(19) United States
(12) Patent Application Publication
(10) Pub. No.: US 2024/0271162 A1
(43) Pub. Date: Aug. 15, 2024

(54) RNA POLYMERASE III PROMOTERS AND METHODS OF USE

(71) Applicant: LifeEDIT Therapeutics, Inc., Durham, NC (US)

(72) Inventors: Tyson D. Bowen, Morrisville, NC (US); Alexandra Briner Crawley, Cary, NC (US); Tedd D. Elich, Durham, NC (US)

(73) Assignee: LifeEDIT Therapeutics, Inc., Durham, NC (US)

(21) Appl. No.: 18/568,638

(22) PCT Filed: Jun. 10, 2022
(86) PCT No.: PCT/US2022/032940

§ 371 Date: Dec. 8, 2023

Related U.S. Application Data
(60) Provisional application No. 63/209,660, filed on Jun. 11, 2021.

(51) Int. Cl. C12N 15/90; C12N 9/22; C12N 9/78; C12N 15/11

(52) U.S. Cl. CPC C12N 15/90; C12N 9/22; C12N 9/78; C12N 15/11; C12Y 305/04; C12N 2310/20

(57) ABSTRACT

Compositions and methods useful for expressing an RNA are provided. Compositions comprise nucleic acid molecules comprising an RNA polymerase III promoter and expression constructs comprising the novel promoters operably linked to a coding sequence. The promoters can initiate transcription of RNA-coding nucleotide sequences through the recruitment of RNA polymerase III (pol III) or, in some embodiments, polypeptide-encoding nucleotide sequences through the recruitment of RNA polymerase II. The promoters thus find use in transcribing nucleotide sequences, including but not limited to, those encoding guide RNAs, and polypeptide-encoding sequences. Such expression constructs comprising the novel promoters operably linked to nucleotide sequences encoding guide RNAs find use in binding and/or modifying the sequence of a target nucleic acid molecule, modifying the expression of a target gene, or detecting a target nucleotide sequence in cells comprising an RNA-guided nuclease (RGN) or RNA-guided nucleotide-binding polypeptide (RGNBP).

### CROSS-REFERENCE TO RELATED APPLICATION

[0001] This application claims priority to U.S. Provisional Patent Application No. 63/209,660, filed Jun. 11, 2021, which is fully incorporated by reference herein.

### REFERENCE TO A SEQUENCE LISTING SUBMITTED ELECTRONICALLY AS A TEXT FILE

[0002] The instant application contains a Sequence Listing which has been submitted in ASCII format via EFS-Web and is hereby incorporated by reference in its entirety. Said ASCII copy, created on Jun. 9, 2022, is named L103438_1250WO_0149_9_SL.txt, and is 714 KB in size.

### FIELD OF THE INVENTION

[0003] The present invention relates to the field of molecular biology and gene editing.

### BACKGROUND OF THE INVENTION

[0004] Small RNAs are used in many genome editing or expression modulation techniques, including gene silencing through the RNA interference (RNAi) pathway. Genome editing techniques utilizing RNA-guided nucleases, such as the Clustered Regularly Interspaced Short Palindromic Repeats (CRISPR)-associated (Cas) proteins of the CRISPR-Cas bacterial system, allow for the targeting of specific sequences by complexing the nucleases with guide RNA that specifically hybridizes with a particular target sequence. Producing target-specific guide RNAs is less costly and more efficient than previous methods of genome editing that required the generation of chimeric nucleases for each target sequence. Small RNAs useful in genome editing or gene silencing are typically expressed from RNA polymerase III promoters, rather than RNA polymerase II-regulated promoters which are more generally employed for the expression of polypeptides. In some instances, however, pol III promoters can also recruit RNA polymerase II and can initiate transcription of an operably linked polypeptide-encoding sequence.

### BRIEF SUMMARY OF THE INVENTION

[0005] Compositions and methods for expressing an RNA and preparing an RNA expression construct are provided. Compositions comprise nucleic acid molecules comprising an RNA polymerase III promoter and expression constructs comprising the novel promoters operably linked to a coding sequence. The promoters can initiate transcription of RNA-coding nucleotide sequences through the recruitment of RNA polymerase III (pol III) or, in some embodiments, polypeptide-encoding nucleotide sequences through the recruitment of RNA polymerase II. The promoters thus find use in transcribing nucleotide sequences, including but not limited to, those encoding guide RNAs, and polypeptide-encoding sequences. Such expression constructs comprising the novel promoters operably linked to nucleotide sequences encoding guide RNAs find use in binding and/or modifying the sequence of a target nucleic acid molecule, modifying the expression of a target gene, or detecting a target nucleic acid molecule in cells comprising an RNA-guided nuclease (RGN) or RNA-guided nucleotide-binding polypeptide (RGNBP). Also provided are polynucleotides comprising the expression cassettes comprising the promoters operably linked to a guide RNA-encoding nucleotide sequence and RGN-encoding nucleotide sequences.

[0006] In one aspect, the present disclosure provides a promoter comprising a nucleotide sequence having at least 90% sequence identity to the nucleotide sequence set forth as any one of SEQ ID NOs: 6-10.

[0007] In some embodiments of the above aspect, the promoter comprises a nucleotide sequence having at least 95% sequence identity to the nucleotide sequence set forth as any one of SEQ ID NOs: 6-10. In some embodiments of the above aspect, the promoter comprises a nucleotide sequence having at least 96%, 97%, 98%, or at least 99% sequence identity to the nucleotide sequence set forth as any one of SEQ ID NOs: 6-10. In some embodiments, the promoter comprises a nucleotide sequence having 100% sequence identity to the nucleotide sequence set forth as any one of SEQ ID NOs: 6-10.

[0008] In some embodiments of the above aspect, the promoter comprises a TATA box sequence. In some embodiments, the promoter comprises an octamer (OCT) sequence. In some embodiments, the promoter comprises a SPH sequence. In some embodiments, the promoter comprises a proximal sequence element (PSE).

[0009] In another aspect, the present disclosure provides a vector comprising the promoter as described hereinabove.

[0010] In some embodiments of the above aspect, the vector is a viral vector. In some embodiments, the viral vector is an adeno-associated viral (AAV) vector.

[0011] In another aspect, the present disclosure provides an expression construct comprising the promoter as described hereinabove and a coding sequence, wherein the coding sequence is operably linked to the promoter.

[0012] In some embodiments of the above aspect, the coding sequence is heterologous to the promoter.

[0013] In some embodiments of the above aspect, the coding sequence encodes an RNA. In some embodiments of the above aspect, the RNA comprises a guide RNA.

[0014] In some embodiments of the above aspect, the coding sequence encodes a polypeptide.

[0015] In another aspect, the present disclosure provides a polynucleotide comprising the expression construct as described hereinabove and an RNA-guided nuclease (RGN)-encoding nucleotide sequence, wherein the RGN is capable of binding the guide RNA.

[0016] In some embodiments of the above aspect, the polynucleotide further comprises an RNA polymerase II (pol II) promoter operably linked to the RGN-encoding nucleotide sequence.

[0017] In some embodiments of the above aspect, the RGN is fused to a base-editing polypeptide. In some embodiments, the base-editing polypeptide comprises a cytosine deaminase or adenine deaminase.

[0018] In some embodiments of the above aspect, the RGN is fused to a transcriptional activator or transcriptional repressor.

[0019] In some embodiments of the above aspect, the RGN is fused to a detectable label.

[0020] In some embodiments of the above aspect, the RNA is a crRNA.

[0021] In another aspect, the present disclosure provides a polynucleotide comprising the expression construct as described hereinabove and a tracrRNA-encoding nucleotide sequence.

[0022] In some embodiments of the above aspect, the polynucleotide further comprises an RNA polymerase III (pol III) promoter operably linked to the tracrRNA-encoding nucleotide sequence.

[0023] In some embodiments of the above aspect, the pol III promoter comprises a nucleotide sequence having at least 90% sequence identity to the nucleotide sequence set forth as any one of SEQ ID NOs: 1-10. In some embodiments, the pol III promoter comprises a nucleotide sequence having at least 95% sequence identity to the nucleotide sequence set forth as any one of SEQ ID NOs: 1-10. In some embodiments, the pol III promoter comprises a nucleotide sequence having at least 96%, 97%, 98%, or at least 99% sequence identity to the nucleotide sequence set forth as any one of SEQ ID NOs: 1-10. In some embodiments, the pol III promoter comprises a nucleotide sequence having 100% sequence identity to the nucleotide sequence set forth as any one of SEQ ID NOs: 1-10.

[0024] In some embodiments of the above aspect, the polynucleotide further comprises an RNA-guided nuclease (RGN)-encoding nucleotide sequence, wherein the RGN is capable of binding the crRNA and the tracrRNA.

[0025] In some embodiments of the above aspect, the polynucleotide further comprises an RNA polymerase II (pol II) promoter operably linked to the RGN-encoding nucleotide sequence.

[0026] In some embodiments of the above aspect, the RGN is fused to a base-editing polypeptide. In some embodiments, the base-editing polypeptide comprises a cytosine deaminase or adenine deaminase.

[0027] In some embodiments of the above aspect, the RGN is fused to a transcriptional activator or transcriptional repressor.

[0028] In some embodiments of the above aspect, the RGN is fused to a detectable label.

[0029] In some embodiments of the above aspect, the RNA is a tracrRNA.

[0030] In another aspect, the present disclosure provides a polynucleotide comprising the expression construct as described hereinabove and a crRNA-encoding nucleotide sequence.

[0031] In some embodiments of the above aspect, the polynucleotide further comprises an RNA polymerase III (pol III) promoter operably linked to the crRNA-encoding nucleotide sequence.

[0032] In some embodiments of the above aspect, the pol III promoter comprises a nucleotide sequence having at least 90% sequence identity to the nucleotide sequence set forth as any one of SEQ ID NOs: 1-10. In some embodiments, the pol III promoter comprises a nucleotide sequence having at least 95% sequence identity to the nucleotide sequence set forth as any one of SEQ ID NOs: 1-10. In some embodiments, the pol III promoter comprises a nucleotide sequence having at least 96%, 97%, 98%, or at least 99% sequence identity to the nucleotide sequence set forth as any one of SEQ ID NOs: 1-10. In some embodiments, the pol III promoter comprises a nucleotide sequence having 100% sequence identity to the nucleotide sequence set forth as any one of SEQ ID NOs: 1-10.

[0033] In some embodiments of the above aspect, the polynucleotide further comprises an RNA-guided nuclease (RGN)-encoding nucleotide sequence, wherein the RGN is capable of binding to the crRNA and the tracrRNA.

[0034] In some embodiments of the above aspect, the polynucleotide further comprises an RNA polymerase II (pol II) promoter operably linked to the RGN-encoding nucleotide sequence.

[0035] In some embodiments of the above aspect, the RGN is fused to a base-editing polypeptide. In some embodiments, the base-editing polypeptide comprises a cytosine deaminase or adenine deaminase.

[0036] In some embodiments of the above aspect, the RGN is fused to a transcriptional activator or transcriptional repressor.

[0037] In some embodiments of the above aspect, the RGN is fused to a detectable label.

[0038] In some embodiments of the above aspect, the RNA comprises a gene silencing RNA.

[0039] In still another aspect, the present disclosure provides a vector comprising the expression construct as described hereinabove or the polynucleotide as described hereinabove.

[0040] In some embodiments of the above aspect, the vector is a viral vector. In some embodiments, the viral vector is an adeno-associated viral (AAV) vector.

[0041] In yet another aspect, the present disclosure provides an expression construct comprising: a) a promoter comprising a nucleotide sequence having at least 90% sequence identity to the nucleotide sequence set forth as any one of SEQ ID NOs: 1-5; and b) a heterologous coding sequence operably linked to the promoter. In some embodiments, the promoter comprises a nucleotide sequence having at least 95% sequence identity to the nucleotide sequence set forth as any one of SEQ ID NOs: 1-5. In some embodiments, the promoter comprises a nucleotide sequence having at least 96%, 97%, 98%, or at least 99% sequence identity to the nucleotide sequence set forth as any one of SEQ ID NOs: 1-5. In some embodiments, the promoter comprises a nucleotide sequence having 100% sequence identity to the nucleotide sequence set forth as any one of SEQ ID NOs: 1-5.

[0042] In some embodiments of the above aspect, the promoter comprises a TATA box sequence. In some embodiments, the promoter comprises an octamer (OCT) sequence. In some embodiments, the promoter comprises a SPH sequence. In some embodiments, the promoter comprises a proximal sequence element (PSE).

[0043] In some embodiments of the above aspect, the heterologous coding sequence encodes an RNA. In some embodiments, the RNA comprises a guide RNA.

[0044] In some embodiments of the above aspect, the heterologous coding sequence encodes a polypeptide.

[0045] In another aspect, the present disclosure provides a polynucleotide comprising the expression construct as described hereinabove and an RNA-guided nuclease (RGN)-encoding nucleotide sequence, wherein the RGN is capable of binding the guide RNA.

[0046] In some embodiments of the above aspect, the polynucleotide further comprises an RNA polymerase II (pol II) promoter operably linked to the RGN-encoding nucleotide sequence.

[0047] In some embodiments of the above aspect, the RGN is fused to a base-editing polypeptide. In some embodiments, the base-editing polypeptide comprises a cytosine deaminase or adenine deaminase.

[0048] In some embodiments of the above aspect, the RGN is fused to a transcriptional activator or transcriptional repressor.

[0049] In some embodiments of the above aspect, the RGN is fused to a detectable label.

[0050] In some embodiments of the above aspect, the RNA is a crRNA.

[0051] In another aspect, the present disclosure provides a polynucleotide comprising the expression construct as described hereinabove and a tracrRNA-encoding nucleotide sequence.

[0052] In some embodiments of the above aspect, the polynucleotide further comprises an RNA polymerase III (pol III) promoter operably linked to the tracrRNA-encoding nucleotide sequence.

[0053] In some embodiments of the above aspect, the pol III promoter comprises a nucleotide sequence having at least 90% sequence identity to the nucleotide sequence set forth as any one of SEQ ID NOs: 1-10. In some embodiments, the pol III promoter comprises a nucleotide sequence having at least 95% sequence identity to the nucleotide sequence set forth as any one of SEQ ID NOs: 1-10. In some embodiments, the pol III promoter comprises a nucleotide sequence having at least 96%, 97%, 98%, or at least 99% sequence identity to the nucleotide sequence set forth as any one of SEQ ID NOs: 1-10. In some embodiments, the pol III promoter comprises a nucleotide sequence having 100% sequence identity to the nucleotide sequence set forth as any one of SEQ ID NOs: 1-10.

[0054] In some embodiments of the above aspect, the polynucleotide further comprises an RNA-guided nuclease (RGN)-encoding nucleotide sequence, wherein the RGN is capable of binding the crRNA and the tracrRNA.

[0055] In some embodiments of the above aspect, the polynucleotide further comprises an RNA polymerase II (pol II) promoter operably linked to the RGN-encoding nucleotide sequence.

[0056] In some embodiments of the above aspect, the RGN is fused to a base-editing polypeptide. In some embodiments, the base-editing polypeptide comprises a cytosine deaminase or adenine deaminase.

[0057] In some embodiments of the above aspect, the RGN is fused to a transcriptional activator or transcriptional repressor.

[0058] In some embodiments of the above aspect, the RGN is fused to a detectable label.

[0059] In some embodiments of the above aspect, the RNA is a tracrRNA.

[0060] In another aspect, the present disclosure provides a polynucleotide comprising the expression construct as described hereinabove and a crRNA-encoding nucleotide sequence.

[0061] In some embodiments of the above aspect, the polynucleotide further comprises an RNA polymerase III (pol III) promoter operably linked to the crRNA-encoding nucleotide sequence.

[0062] In some embodiments of the above aspect, the pol III promoter comprises a nucleotide sequence having at least 90% sequence identity to the nucleotide sequence set forth as any one of SEQ ID NOs: 1-10. In some embodiments, the pol III promoter comprises a nucleotide sequence having at least 95% sequence identity to the nucleotide sequence set forth as any one of SEQ ID NOs: 1-10. In some embodiments, the pol III promoter comprises a nucleotide sequence having at least 96%, 97%, 98%, or at least 99% sequence identity to the nucleotide sequence set forth as any one of SEQ ID NOs: 1-10. In some embodiments, the pol III promoter comprises a nucleotide sequence having 100% sequence identity to the nucleotide sequence set forth as any one of SEQ ID NOs: 1-10.

[0063] In some embodiments of the above aspect, the polynucleotide further comprises an RNA-guided nuclease (RGN)-encoding nucleotide sequence, wherein the RGN is capable of binding to the crRNA and the tracrRNA.

[0064] In some embodiments of the above aspect, the polynucleotide further comprises an RNA polymerase II (pol II) promoter operably linked to the RGN-encoding nucleotide sequence.

[0065] In some embodiments of the above aspect, the RGN is fused to a base-editing polypeptide. In some embodiments, the base-editing polypeptide comprises a cytosine deaminase or adenine deaminase.

[0066] In some embodiments of the above aspect, the RGN is fused to a transcriptional activator or transcriptional repressor.

[0067] In some embodiments of the above aspect, the RGN is fused to a detectable label.

[0068] In some embodiments of the above aspect, the RNA comprises a gene silencing RNA.

[0069] In yet another aspect, the present disclosure provides a vector comprising the expression construct as described hereinabove or the polynucleotide as described hereinabove.

[0070] In some embodiments of the above aspect, the vector is a viral vector. In some embodiments, the viral vector is an adeno-associated viral (AAV) vector.

[0071] In still another aspect, the present disclosure provides a cell comprising the promoter as described hereinabove, the expression construct as described hereinabove, the polynucleotide as described hereinabove, or the vector as described hereinabove.

[0072] In some embodiments of the above aspect, the cell is a prokaryotic cell.

[0073] In some embodiments of the above aspect, the cell is a eukaryotic cell.

[0074] In some embodiments of the above aspect, the eukaryotic cell is a mammalian cell. In some embodiments, the mammalian cell is a human cell. In some embodiments, the human cell is an immune cell. In some embodiments, the immune cell is a stem cell. In some embodiments, the stem cell is an induced pluripotent stem cell. In some embodiments, the eukaryotic cell is an insect or avian cell. In some embodiments, the eukaryotic cell is a fungal cell.

[0075] In some embodiments of the above aspect, the eukaryotic cell is a plant cell.

[0076] In another aspect, the present disclosure provides a plant comprising the promoter as described hereinabove, the expression construct as described hereinabove, the polynucleotide as described hereinabove, the vector as described hereinabove, or the plant cell as described hereinabove.

[0077] In another aspect, the present disclosure provides a seed comprising the plant cell as described hereinabove.

[0078] In another aspect, the present disclosure provides a pharmaceutical composition comprising a pharmaceutically acceptable carrier and the expression construct as described hereinabove, the polynucleotide as described hereinabove, the vector as described hereinabove, or the cell as described hereinabove.

[0079] In some embodiments of the above aspect, the pharmaceutical composition is lipid-based. In some embodiments of the above aspect, the lipid-based pharmaceutical composition comprises liposomes or lipid nanoparticles (LNPs). In some embodiments of the above aspect, the expression construct, the polynucleotide, the vector, or the cell is encapsulated in, and/or non-covalently or covalently attached to the liposomes or the LNPs.

[0080] In another aspect, the present disclosure provides a method for preparing an expression construct wherein the method comprises inserting a coding sequence into a nucleic acid molecule comprising a promoter as described hereinabove such that the coding sequence is operably linked to the promoter.

[0081] In another aspect, the present disclosure provides a method for preparing an expression construct wherein the method comprises inserting a promoter comprising a nucleotide sequence having at least 90% sequence identity to the nucleotide sequence set forth as any one of SEQ ID NOs: 6-10 into a nucleic acid molecule comprising a coding sequence such that the coding sequence is operably linked to the promoter.

[0082] In some embodiments of the above aspect, the promoter comprises a nucleotide sequence having at least 95% sequence identity to the nucleotide sequence set forth as any one of SEQ ID NOs: 6-10. In some embodiments, the promoter comprises a nucleotide sequence having at least 96%, 97%, 98%, or at least 99% sequence identity to the nucleotide sequence set forth as any one of SEQ ID NOs: 6-10. In some embodiments, the promoter comprises a nucleotide sequence having 100% sequence identity to the nucleotide sequence set forth as any one of SEQ ID NOs: 6-10.

[0083] In some embodiments of the above aspect, the promoter comprises a TATA box sequence. In some embodiments, the promoter comprises an octamer (OCT) sequence. In some embodiments, the promoter comprises a SPH sequence. In some embodiments, the promoter comprises a proximal sequence element (PSE).

[0084] In some embodiments of the above aspect, the coding sequence is heterologous to the promoter.

[0085] In some embodiments of the above aspect, the coding sequence encodes an RNA. In some embodiments of the above aspect, the RNA comprises a guide RNA.

[0086] In some embodiments of the above aspect, the RNA is a crRNA.

[0087] In some embodiments of the above aspect, the RNA is a tracrRNA.

[0088] In some embodiments of the above aspect, the RNA comprises a gene silencing RNA.

[0089] In some embodiments of the above aspect, the coding sequence encodes a polypeptide.

[0090] In still another aspect, the present disclosure provides a method for expressing an RNA, the method comprising contacting in vitro the expression construct as described hereinabove, or the polynucleotide as described hereinabove with RNA polymerase III and ribonucleotide triphosphates.

[0091] In still another aspect, the present disclosure provides a method for expressing an RNA in a cell, the method comprising introducing into the cell the expression construct as described hereinabove, or the polynucleotide as described hereinabove.

[0092] In yet another aspect, the present disclosure provides a method for expressing a polypeptide in a cell, the method comprising introducing into the cell the expression construct as described hereinabove.

[0093] In yet another aspect, the present disclosure provides a method for making an RGN ribonucleoprotein complex in a cell, the method comprising introducing into a cell the polynucleotide as described hereinabove, wherein the RGN and the gRNA form an RGN ribonucleoprotein complex.

[0094] In some embodiments of the above aspect, the method further comprises purifying the RGN ribonucleoprotein complex.

[0095] In still another aspect, the present disclosure provides a method for making an mRNA in vitro, the method comprising contacting the expression construct as described hereinabove with RNA polymerase II and ribonucleotide triphosphates.

[0096] In some embodiments of the above aspect, the method further comprises contacting the expression construct with a cap analog to generate a capped mRNA. In some embodiments, the method further comprises contacting the capped mRNA with a poly(A) polymerase to generate a capped and tailed mRNA. In some embodiments, the method further comprises contacting the capped mRNA or the capped and tailed mRNA in vitro with a cell-free lysate to generate an in vitro translated polypeptide.

[0097] In still another aspect, the present disclosure provides a method for binding a target nucleic acid molecule in a cell, wherein said target nucleic acid molecule comprises a target sequence, the method comprising introducing into the cell the polynucleotide as described hereinabove, wherein the guide RNA as described hereinabove or the crRNA and tracrRNA of the polynucleotide as described hereinabove binds to the RGN, thereby directing the RGN to bind to the target sequence within said target nucleic acid molecule.

[0098] In still another aspect, the present disclosure provides a method for cleaving and/or modifying a target nucleic acid molecule in a cell, wherein said target nucleic acid molecule comprises a target sequence, the method comprising introducing into the cell the polynucleotide as described hereinabove, wherein the guide RNA as described hereinabove or the crRNA and tracrRNA of the polynucleotide as described hereinabove binds to the RGN, thereby directing the RGN to bind to the target sequence and cleave and/or modify the target nucleic acid molecule.

[0099] In yet another aspect, the present disclosure provides a method for modifying the expression of a target gene in a cell, wherein the target gene comprises a target sequence, the method comprising introducing into the cell the polynucleotide as described hereinabove, wherein the guide RNA as described hereinabove or the crRNA and tracrRNA of the polynucleotide as described hereinabove binds to the RGN, thereby directing the RGN to the target sequence and modifying the expression of the target gene.

[0100] In still another aspect, the present disclosure provides a method for detecting a target sequence in a cell, the method comprising introducing into the cell the polynucleotide as described hereinabove, wherein the guide RNA as described hereinabove or the crRNA and tracrRNA of the polynucleotide as described hereinabove binds to the RGN, thereby directing the RGN to the target sequence; and detecting the detectable label.

[0101] In yet another aspect, the present disclosure provides a method for binding a target nucleic acid molecule in a cell, wherein said target nucleic acid molecule comprises a target sequence, wherein the method comprises introducing into the cell the expression construct as described hereinabove, or the polynucleotide as described hereinabove, wherein the cell comprises an RNA-guided nuclease (RGN); and wherein the guide RNA as described hereinabove, or the crRNA and tracrRNA of the polynucleotide as described hereinabove binds to the RGN, thereby directing the RGN to bind the target sequence within the target nucleic acid molecule.

[0102] In another aspect, the present disclosure provides a method for cleaving and/or modifying a target nucleic acid molecule in a cell, wherein the target nucleic acid molecule comprises a target sequence, wherein the method comprises introducing into the cell the expression construct as described hereinabove, or the polynucleotide as described hereinabove, wherein the cell comprises: a) an RNA-guided nuclease (RGN); or b) a fusion protein comprising a nuclease-inactive or nickase RGN fused to a base-editing polypeptide; and wherein the guide RNA as described hereinabove, or the crRNA and tracrRNA of the polynucleotide as described hereinabove binds to the RGN, thereby directing the RGN or the fusion protein to bind to the target sequence and cleave and/or modify the target nucleic acid molecule.

[0103] In some embodiments of the above aspect, the method further comprises introducing the RGN or the fusion protein or a nucleic acid molecule encoding the same into the cell prior to or simultaneously with the introduction of the expression construct as described hereinabove, or the polynucleotide as described hereinabove.

[0104] In another aspect, the present disclosure provides a method for modifying the expression of a target gene, wherein the target gene comprises a target sequence, wherein the method comprises introducing into the cell the expression construct as described hereinabove, or the polynucleotide as described hereinabove, wherein the cell comprises a fusion protein comprising an RNA-guided nuclease (RGN) fused to a transcriptional activator or transcriptional repressor, and wherein the guide RNA as described hereinabove, or the crRNA and tracrRNA of the polynucleotide as described hereinabove binds to the RGN, thereby directing the fusion protein to the target sequence and modifying the expression of the target gene.

[0105] In some embodiments of the above aspect, the method further comprises introducing the fusion protein or a nucleic acid molecule encoding the same into the cell prior to or simultaneously with the introduction of the expression construct as described hereinabove, or the polynucleotide as described hereinabove.

[0106] In another aspect, the present disclosure provides a method for detecting a target sequence in a cell, wherein the method comprises introducing into the cell the expression construct as described hereinabove, or the polynucleotide as described hereinabove, wherein the cell comprises a fusion protein comprising an RNA-guided nuclease (RGN) fused to a detectable label, and wherein the guide RNA as described hereinabove, or the crRNA and tracrRNA of the polynucleotide as described hereinabove binds to the RGN, thereby directing the fusion protein to the target sequence; and detecting the detectable label.

[0107] In some embodiments of the above aspect, the method further comprises introducing the fusion protein or a nucleic acid molecule encoding the same into the cell prior to or simultaneously with the introduction of the expression construct as described hereinabove, or the polynucleotide as described hereinabove.

[0108] In still another aspect, the present disclosure provides a method for binding a target nucleic acid molecule in a cell, wherein said target nucleic acid molecule comprises a target sequence, wherein the method comprises: a) introducing into the cell the expression construct as described hereinabove, or the polynucleotide as described hereinabove; and b) introducing into the cell: i) an RNA-guided nuclease (RGN); or ii) a nucleic acid molecule encoding an RGN; wherein the step a) occurs before, during, or after step b); and wherein the guide RNA as described hereinabove, or the crRNA and tracrRNA of the polynucleotide as described hereinabove binds to the RGN, thereby directing the RGN to bind the target sequence within the target nucleic acid molecule.

[0109] In still another aspect, the present disclosure provides a method for cleaving and/or modifying a target nucleic acid molecule in a cell, wherein the target nucleic acid molecule comprises a target sequence, wherein the method comprises: a) introducing into the cell the expression construct as described hereinabove, or the polynucleotide as described hereinabove; and b) introducing into the cell: i) an RNA-guided nuclease (RGN); ii) a fusion protein comprising a nuclease-inactive or nickase RGN fused to a base-editing polypeptide; iii) a nucleic acid molecule encoding an RGN; or iv) a nucleic acid molecule encoding a fusion protein comprising a nuclease-inactive or nickase RGN fused to a base-editing polypeptide; wherein the step a) occurs before, during, or after step b); and wherein the guide RNA as described hereinabove, or the crRNA and tracrRNA of the polynucleotide as described hereinabove binds to the RGN, thereby directing the RGN or the fusion protein to bind to the target sequence and cleave and/or modify the target nucleic acid molecule.

[0110] In some embodiments of the above aspect, the step b) iii) comprises introducing a polynucleotide comprising the nucleic acid molecule encoding the RGN or the step b) iv) comprises introducing a polynucleotide comprising the nucleic acid molecule encoding the fusion protein, and wherein the polynucleotide further comprises an RNA polymerase II (pol II) promoter operably linked to the nucleic acid molecule encoding the RGN or the nucleic acid molecule encoding the fusion protein.

[0111] In yet another aspect, the present disclosure provides a method for modifying the expression of a target gene, wherein the target gene comprises a target sequence, wherein the method comprises: a) introducing into the cell the expression construct as described hereinabove, or the polynucleotide as described hereinabove; and b) introducing into the cell: i) a fusion protein comprising a nuclease-inactive RNA-guided nuclease (RGN) fused to a transcriptional activator or transcriptional repressor; or ii) a nucleic acid molecule encoding a fusion protein comprising a nuclease-inactive RGN fused to a transcriptional activator or transcriptional repressor; wherein the step a) occurs before, during, or after step b); and wherein the guide RNA as described hereinabove, or the crRNA and tracrRNA of the polynucleotide as described hereinabove binds to the RGN, thereby directing the fusion protein to the target sequence and modifying the expression of the target gene.

[0112] In some embodiments of the above aspect, the step b) ii) comprises introducing a polynucleotide comprising the nucleic acid molecule encoding the fusion protein, and wherein the polynucleotide further comprises an RNA polymerase II (pol II) promoter operably linked to the nucleic acid molecule encoding the fusion protein.

[0113] In yet another aspect, the present disclosure provides a method for detecting a target sequence in a cell, wherein the method comprises: a) introducing into the cell the expression construct as described hereinabove, or the polynucleotide as described hereinabove; b) introducing into the cell: i) a fusion protein comprising nuclease-inactive RNA-guided nuclease (RGN) fused to a detectable label; or ii) a nucleic acid molecule encoding a fusion protein comprising a nuclease-inactive RGN fused to a detection label; and c) detecting the detectable label; wherein step a) occurs before, during, or after step b); and wherein the guide RNA as described hereinabove, or the crRNA and tracrRNA of the polynucleotide as described hereinabove binds to the RGN and directs the fusion protein to the target sequence.

[0114] In some embodiments of the above aspect, the step b) ii) comprises introducing into the cell a polynucleotide comprising the nucleic acid molecule encoding the fusion protein, and wherein the polynucleotide further comprises an RNA polymerase II (pol II) promoter operably linked to the nucleic acid molecule encoding the fusion protein.

[0115] In another aspect, the present disclosure provides a method for reducing the expression of a target gene in a cell, the method comprising introducing the expression construct as described hereinabove, wherein the gene silencing RNA reduces the expression of the target gene.

[0116] In another aspect, the present disclosure provides a method for treating a disease, the method comprising administering to a subject in need thereof a pharmaceutical composition comprising a pharmaceutically acceptable carrier and a polynucleotide as described hereinabove.

[0117] In some embodiments of the above aspect, the disease is associated with a causal mutation and the pharmaceutical composition corrects the causal mutation.

[0118] In another aspect, the present disclosure provides use of the polynucleotide as described hereinabove for the treatment of a disease in a subject.

[0119] In some embodiments of the above aspect, the disease is associated with a causal mutation and the treatment comprises correcting the causal mutation.

[0120] In another aspect, the present disclosure provides use of the polynucleotide as described hereinabove for the manufacture of a medicament useful for treating a disease.

[0121] In some embodiments of the above aspect, the disease is associated with a causal mutation and the medicament corrects the causal mutation.

[0122] In still another aspect, the present disclosure provides a method for treating a disease, the method comprising administering to a subject in need thereof a pharmaceutical composition comprising a pharmaceutically acceptable carrier and a polynucleotide as described hereinabove, wherein the disease is associated with the expression of a target gene, wherein the target gene comprises a target sequence, and wherein the guide RNA of the polynucleotide as described hereinabove or the crRNA and tracrRNA of the polynucleotide as described hereinabove binds to the RGN, thereby directing the RGN to the target sequence and modifying the expression of the target gene.

[0123] In still another aspect, the present disclosure provides use of the polynucleotide as described hereinabove for the treatment of a disease associated with the expression of a target gene in a subject.

[0124] In yet another aspect, the present disclosure provides use of the polynucleotide as described hereinabove for the manufacture of a medicament useful for treating a disease associated with the expression of a target gene.

[0125] In yet another aspect, the present disclosure provides a method for treating a disease, the method comprising administering to a subject in need thereof a pharmaceutical composition comprising a pharmaceutically acceptable carrier and an expression construct as described hereinabove, wherein the disease is associated with the overexpression of a target gene, and wherein the gene silencing RNA reduces the expression of the target gene.

[0126] In still another aspect, the present disclosure provides use of the expression construct as described hereinabove for the treatment of a disease associated with the overexpression of a target gene in a subject.

[0127] In still another aspect, the present disclosure provides use of the expression construct as described hereinabove for the manufacture of a medicament useful for treating a disease associated with the overexpression of a target gene.

### DETAILED DESCRIPTION

[0128] Many modifications and other embodiments of the inventions set forth herein will come to mind to one skilled in the art to which these inventions pertain having the benefit of the teachings presented in the foregoing descriptions and the associated drawings. Therefore, it is to be understood that the inventions are not to be limited to the specific embodiments disclosed and that modifications and other embodiments are intended to be included within the scope of the appended embodiments. Although specific terms are employed herein, they are used in a generic and descriptive sense only and not for purposes of limitation.

### I. Overview

[0129] Nucleic acids comprising a promoter and expression cassettes wherein the promoters are operably linked to a coding sequence are provided. A promoter is a non-coding DNA sequence sufficient to direct transcription of an operably linked nucleic acid molecule, which is usually downstream (3′) of the promoter. The term “promoter” encompasses a minimal promoter, the minimal sequence needed for RNA polymerase binding and initiating transcription of an operably linked coding sequence, as well as transcription control elements (e.g., enhancers) that render promoter-dependent gene expression controllable in a cell type-specific, tissue-specific, or temporal-specific manner, or that are inducible by signals or agents.

[0130] In eukaryotes, the nucleotide sequence of the promoter determines the type of RNA polymerase (i.e., RNA polymerase I, RNA polymerase II, or RNA polymerase III) that binds and initiates transcription at a specific transcription initiation site. In general, RNA polymerase I transcribes ribosomal RNA (except for ribosomal 5S rRNA), RNA polymerase II transcribes DNA into precursors of messenger RNA (mRNA) that can then be translated into polypeptides, most small nuclear (snRNA), and microRNA, and RNA polymerase III transcribes DNA into ribosomal 5S rRNA, tRNA, and other small RNAs such as the U6 snRNA.

[0131] The presently disclosed promoters can function as pol III promoters. RNA polymerase III promoters, also referred to herein as pol III promoters, are promoters that are capable of being bound by RNA polymerase III (pol III), which then initiates transcription of an operably linked RNA-coding sequence. In some instances, pol III promoters can also be bound by RNA polymerase II (pol II), which can initiate transcription of mRNA (see, for example, Gao et al. (2018) Molecular Therapy: Nucleic Acids 12:135-145). Thus, in some embodiments, the presently disclosed promoters can be bound by pol II and transcription initiated therefrom. The presently disclosed promoters can be used to initiate transcription of an RNA-encoding sequence through the recruitment of pol III or of a polypeptide-encoding sequence through the recruitment of pol II.

[0132] As used herein, a “coding sequence” refers to a nucleotide sequence that encodes either an RNA (e.g., rRNA, tRNA, snRNA, microRNA, guide RNA) or a messenger RNA (mRNA) precursor that can then be translated into a polypeptide comprising an amino acid sequence. Coding sequences that encode an RNA that cannot be translated into a polypeptide are referred to herein as RNA-encoding sequences. In general, when operably linked to the presently disclosed promoters, RNA-encoding sequences are transcribed by pol III. Coding sequences that encode a mRNA precursor that can then be translated into a polypeptide are referred to herein as polypeptide-encoding sequences. Such polypeptide-encoding sequences are transcribed by pol II.

### II. Promoter Sequences

[0133] Provided herein are promoter sequences having the sequence set forth in any one of SEQ ID NOs: 1-10 or an active variant or fragment thereof. The presently disclosed promoters are RNA pol III promoters and in some embodiments, can function as RNA pol II promoters by recruiting pol II.

[0134] There are three types of pol III promoters: type 1, type 2, and type 3. Type 1 pol III promoters include 5S rRNA promoters and initiation involves TFIIIA binding to the C Block intragenic 5S rRNA control sequence, serving as a platform to position TFIIIC, and subsequent assembly of TFIIIB. Type 2 pol III promoters include tRNA promoters and transcription initiation involves TFIIIC binding to A and B Block intragenic regions, serving as a platform to position TFIIIB, which in turn, assembles Pol III at the transcription start site. Type 3 pol III promoters solely utilize upstream regulatory elements and do not utilize intragenic elements. Type 3 pol III promoters generally comprise a proximal sequence element (PSE), a TATA box, and an upstream distal sequence element (DSE). The DSE comprises at least one of an octamer (OCT) sequence and a SphI postoctamer homology (SPH) sequence. The transcription factor Oct-1 binds the OCT sequence in the DSE and a SBF (SPH-binding factor) (also referred to as STAF (selenocysteine tRNA gene transcription activating factor)/SBF or zinc finger protein 143 (ZNF143)) transcription factor binds to the SPH sequence in the DSE. Assembly of the snRNA activating protein complex (SNAPc) to the PSE is stimulated by Octi and/or SBH binding to the DSE. SNAPc acts to assemble TFIIIB, which consists of a TATA-binding protein (TBP), a TFIIB-related factor (BRF2), and B-double-prime (BDP1), at the TATA box. TFIIIB, in turn, assembles Pol III at the start site of transcription. Type 3 pol III promoters, such as 7SK, U6, and H1, can be used for the expression of small RNA, including short hairpin RNA (shRNA) and guide RNA (gRNA).

[0135] In some embodiments, the presently disclosed promoters or active variants or fragments thereof do not comprise intragenic elements for the regulation of transcription of an operably linked sequence and are thus considered type 3 pol III promoters.

[0136] In some embodiments, active variants or fragments of the presently disclosed promoters comprise a TATA box sequence that is recognized by a TATA-binding protein. The consensus sequence of a TATA box is generally TATAWAW (SEQ ID NO: 54), wherein W is A or T. In some embodiments, active variants or fragments of the presently disclosed promoters comprise a TATA box having the sequence of TATAA (SEQ ID NO: 55).

[0137] In some embodiments, active variants or fragments of the presently disclosed promoters comprise an OCT sequence that is recognized and bound by an Oct-1 transcription factor. Oct-1 transcription factors belong to the POU transcription factor family and comprise a 160-amino acid POU domain necessary for DNA binding to an octameric sequence. A non-limiting example of an Oct-1 transcription factor is the human Oct-1 set forth as NCBI Acc. No. NP_001352777. In some embodiments, the OCT sequence comprises the consensus sequence of ATTTGCAT (SEQ ID NO: 56).

[0138] In some embodiments, active variants or fragments of the presently disclosed promoters comprise a SPH sequence that is recognized and bound by a SPH-binding factor (SBF) transcription factor, which is also referred to as the zinc finger 143 (ZNF143) protein and comprises a zinc finger binding domain. A non-limiting example of a SBF protein is the human SBF/ZNF143 protein set forth as NCBI Acc. No. NP_003433.3. In some embodiments, the SPH sequence comprises the consensus sequence of CTCCGCCCCGCTTCCGG (SEQ ID NO: 57).

[0139] In some embodiments, active variants or fragments of the presently disclosed promoters comprise a PSE that is recognized and bound by the SNAPc complex. The SNAPc complex is comprised of five subunits, SNAP190, SNAP50/PTFβ, SNAP45/PTFδ, SNAP43/PTFγ, and SNAP19 (see, e.g., Henry et al. 1998 Cold Spring Harbor Symp. Quant. Biol. Vol. 63, pp. 111-120, which is herein incorporated by reference in its entirety). The PSE is often approximately 55 bp upstream from the transcription start site, but can range from about −66 bp to about −47 bp (see, e.g., Myslinski et al. 2001 Nucleic Acids Res 29(12):2502-2509, which is herein incorporated by reference). In some embodiments, the PSE is between −66 bp and −47 bp (i.e., between 66 bp and 47 bp upstream from the transcription start site).

[0140] In some instances, pol III promoters can also be bound by pol II, which can initiate transcription of mRNA (Gao et al. (2018) Molecular Therapy: Nucleic Acids 12:135-145). Thus, in some embodiments, the presently disclosed promoters can function as pol II promoters by recruiting pol II and allowing transcription to be initiated therefrom.

[0141] In some embodiments, the promoter is truncated through the removal of sequence, such as the sequence that is looped around a positional nucleosome. The promoters set forth as SEQ ID NOs: 6-10 are truncated versions of SEQ ID NOs: 1-5, respectively, in which the putative nucleosomal sequence has been removed, as well as nucleotides from the 5′ end of the promoter.

### III. Vectors and Expression Constructs

[0142] Provided herein are polynucleotides and vectors comprising a presently disclosed promoter (i.e., SEQ ID NOs: 1-10 or an active variant or fragment of any thereof) and expression constructs that comprise a presently disclosed promoter operably linked to a coding sequence.

[0143] The use of the term “polynucleotide” or “nucleic acid molecule” is not intended to limit the present disclosure to polynucleotides comprising DNA. Those of ordinary skill in the art will recognize that polynucleotides can comprise ribonucleotides (RNA) and combinations of ribonucleotides and deoxyribonucleotides. Such deoxyribonucleotides and ribonucleotides include both naturally occurring molecules and synthetic analogues. These include peptide nucleic acids (PNAs), PNA-DNA chimers, locked nucleic acids (LNAs), and phosphothiorate linked sequences. The polynucleotides disclosed herein also encompass all forms of sequences including, but not limited to, single-stranded forms, double-stranded forms, DNA-RNA hybrids, triplex structures, stem-and-loop structures, and the like.

[0144] The polynucleotide comprising a presently disclosed promoter (i.e., SEQ ID NOs: 1-10 or an active variant or fragment of any thereof) can be present in a vector or multiple vectors. A “vector” refers to a polynucleotide composition for transferring, delivering, or introducing a nucleic acid into a host cell. Suitable vectors include plasmid vectors, phagemids, cosmids, artificial/mini-chromosomes, transposons, and viral vectors (e.g., lentiviral vectors, adeno-associated viral vectors, baculoviral vector). The vector can comprise additional expression control sequences (e.g., enhancer sequences, Kozak sequences, polyadenylation sequences, transcriptional termination sequences), selectable marker sequences (e.g., antibiotic resistance genes), origins of replication, and the like. Additional information can be found in “Current Protocols in Molecular Biology” Ausubel et al., John Wiley & Sons, New York, 2003 or “Molecular Cloning: A Laboratory Manual” Sambrook & Russell, Cold Spring Harbor Press, Cold Spring Harbor, N.Y., 3rd edition, 2001.

[0145] The vector can also comprise a selectable marker gene for the selection of transformed cells. Selectable marker genes are utilized for the selection of transformed cells or tissues. Marker genes include genes encoding antibiotic resistance, such as those encoding neomycin phosphotransferase II (NEO) and hygromycin phosphotransferase (HPT), as well as genes conferring resistance to herbicidal compounds, such as glufosinate ammonium, bromoxynil, imidazolinones, and 2,4-dichlorophenoxyacetate (2,4-D).

[0146] The presently disclosed promoters (i.e., SEQ ID NOs: 1-10 or an active variant or fragment of any thereof) can be provided in expression constructs (also referred to herein as “expression cassettes”) for in vitro expression or expression in a cell, organelle, embryo, or organism of interest. In various embodiments, the cassette includes 5′, and in some embodiments, 3′ regulatory sequences operably linked to a polynucleotide encoding an RNA or a polypeptide that allows for expression of the polynucleotide. The cassette may additionally contain at least one additional gene or genetic element to be cotransformed into the organism. Where additional genes or elements are included, the components are operably linked. The term “operably linked” is intended to mean a functional linkage between two or more elements. For example, an operable linkage between a promoter and a coding sequence of interest (e.g., region coding for an RNA or a polypeptide) is a functional link that allows for expression of the coding sequence of interest. Operably linked elements may be contiguous or non-contiguous. When used to refer to the joining of two protein coding regions, by operably linked is intended that the coding regions are in the same reading frame. Alternatively, the additional gene(s) or element(s) can be provided on multiple expression cassettes. For example, a nucleotide sequence encoding an RNA-guided nuclease (RGN) can be present on one expression cassette, whereas a nucleotide sequence encoding an RNA (e.g., guide RNA) can be on a separate expression cassette. Such an expression cassette is provided with a plurality of restriction sites and/or recombination sites for insertion of the polynucleotides to be under the transcriptional regulation of the regulatory regions. The expression cassette may additionally contain a selectable marker gene.

[0147] The expression cassette will include in the 5′-3′ direction of transcription, a transcriptional (and, in some embodiments, translational) initiation region (i.e., a promoter such as those disclosed herein), a coding sequence, and a transcriptional (and in some embodiments, translational) termination region (i.e., termination region) functional in the organism of interest. In some embodiments, the transcriptional termination region comprises a poly T stretch. In some embodiments, the poly T stretch comprises at least 4 thymines.

[0148] The promoters of the invention are capable of directing or driving expression of a coding sequence in a host cell. The regulatory regions (e.g., promoters, transcriptional regulatory regions, and translational termination regions) may be endogenous or heterologous to the host cell or to each other. As used herein, “heterologous” in reference to a sequence is a sequence that originates from a foreign species, or, if from the same species, is substantially modified from its native form in composition and/or genomic locus by deliberate human intervention. As used herein, a chimeric gene comprises a coding sequence operably linked to a transcription initiation region that is heterologous to the coding sequence.

[0149] Convenient termination regions for polypeptide-encoding sequences are available from the Ti-plasmid of A. tumefaciens, such as the octopine synthase and nopaline synthase termination regions. See also Guerineau et al. (1991)Mol. Gen. Genet. 262:141-144; Proudfoot (1991) Cell 64:671-674; Sanfacon et al. (1991) Genes Dev. 5:141-149; Mogen et al. (1990) Plant Cell 2:1261-1272; Munroe et al. (1990) Gene 91:151-158; Ballas et al. (1989) Nucleic Acids Res. 17:7891-7903; and Joshi et al. (1987) Nucleic Acids Res. 15:9627-9639.

[0150] Additional regulatory signals include, but are not limited to, transcriptional initiation start sites, operators, activators, enhancers, other regulatory elements, ribosomal binding sites, an initiation codon, termination signals, and the like. See, for example, U.S. Pat. Nos. 5,039,523 and 4,853,331; EPO 0480762A2; Sambrook et al. (1992) Molecular Cloning: A Laboratory Manual, ed. Maniatis et al. (Cold Spring Harbor Laboratory Press, Cold Spring Harbor, N.Y.), hereinafter “Sambrook 11”; Davis et al., eds. (1980) Advanced Bacterial Genetics (Cold Spring Harbor Laboratory Press), Cold Spring Harbor, N.Y., and the references cited therein.

[0151] In preparing the expression cassette, the various DNA fragments may be manipulated, so as to provide for the DNA sequences in the proper orientation and, as appropriate, in the proper reading frame. Toward this end, adapters or linkers may be employed to join the DNA fragments or other manipulations may be involved to provide for convenient restriction sites, removal of superfluous DNA, removal of restriction sites, or the like. For this purpose, in vitro mutagenesis, primer repair, restriction, annealing, resubstitutions, e.g., transitions and transversions, may be involved.

[0152] In some embodiments, a coding sequence for a polypeptide (e.g., an RGN) also can be linked to a polyadenylation signal (e.g., SV40 polyA signal and other signals functional in plants) and/or at least one transcriptional termination sequence. Additionally, the coding sequence for a polypeptide (e.g., an RGN) also can be linked to sequence(s) encoding at least one nuclear localization signal, at least one cell-penetrating domain, and/or at least one signal peptide capable of trafficking proteins to particular subcellular locations, as described elsewhere herein.

[0153] In some embodiments, a polynucleotide may comprise two expression constructs, one of which expresses a crRNA and another that expresses a tracrRNA. At least one of the crRNA- and tracrRNA-encoding sequences is operably linked to a presently disclosed promoter (i.e., SEQ ID NOs: 1-10 or an active variant or fragment of any thereof). In some embodiments, one of the crRNA- and tracrRNA-encoding sequences is operably linked to a presently disclosed promoter and the other coding sequence is operably linked to another pol III promoter. Examples of suitable Pol III promoters include, but are not limited to, mammalian U6, U3, H1, and 7SL RNA promoters and rice U6 and U3 promoters.

[0154] In some embodiments, the expression cassette or vector comprising a sequence encoding a crRNA and/or a tracrRNA, or the crRNA and tracrRNA combined to create a guide RNA, can further comprise a sequence encoding an RGN polypeptide that is capable of binding to the crRNA and/or tracrRNA. In some embodiments, the RGN-encoding sequence is operably linked to a pol II promoter. Given that the presently disclosed promoters may recruit pol II, in some embodiments, the RGN-encoding sequence is operably linked to a presently disclosed promoter. In other embodiments, the RGN-encoding sequence is operably linked to a pol II promoter other than the presently disclosed promoters (i.e., SEQ ID NOs: 1-10 or an active variant or fragment of any thereof).

### IV. Coding Sequences

[0155] The presently disclosed promoters (i.e., SEQ ID NOs: 1-10 or an active variant or fragment of any thereof) can be used to express an RNA via the recruitment of pol III or a polypeptide by pol II. Thus, in some embodiments, a presently disclosed promoter is operably linked to a RNA coding sequence. In other embodiments, a presently disclosed promoter is operably linked to a polypeptide-encoding sequence.

### A. RNA Coding Sequences

[0156] In some embodiments, a presently disclosed promoter (i.e., any one of SEQ ID NOs: 1-10 or an active variant or fragment of any thereof) is operably linked to a coding sequence that encodes an RNA. As used herein, “a coding sequence that encodes an RNA” does not encompass a sequence that can be transcribed into an mRNA or a pre-mRNA that can then be translated into a polypeptide. These coding sequences are referred to herein as coding sequences that encode a polypeptide or “polypeptide-encoding sequences”.

[0157] The RNA molecule that can be encoded by an RNA coding sequence include any type of RNA (excluding an mRNA or pre-mRNA), including but not limited to an snRNA, a tRNA, an RNA that can be used in an RNA-guided nuclease system (e.g., a crRNA, a tracrRNA, and a guide RNA), and an RNA that can be used in gene silencing applications (e.g., shRNA, siRNA, antisense RNA).

i. crRNA, tracrRNA, Guide RNA

[0158] The presently disclosed promoters (i.e., SEQ ID NOs: 1-10 or an active variant or fragment of any thereof) can be used to express RNAs involved in RNA-guided nuclease systems that when bound to an RGN, can be used to bind to and/or modify a nucleotide sequence. A presently disclosed promoter can be operably linked to a crRNA-encoding sequence, a tracrRNA-encoding sequence, or a guide RNA-encoding sequence.

[0159] The term “guide RNA” refers to a nucleotide sequence having sufficient complementarity with a target nucleotide sequence to hybridize with the target sequence and direct sequence-specific binding of an associated RNA-guided nuclease to the target nucleotide sequence. More specifically, when the target nucleotide sequence is double-stranded as is the case with DNA, the target nucleotide sequence is comprised of a target strand (which comprises the PAM sequence) and the non-target strand. In these embodiments, the guide RNA has sufficient complementarity with the non-target strand of a double-stranded target sequence (e.g., target DNA) such that the guide RNA hybridizes with the non-target strand and directs sequence-specific binding of an associated RNA-guided nuclease (RGN) to the target sequence (e.g., target DNA sequence). Therefore, in some embodiments, a guide RNA includes a spacer that is identical to the sequence of the target strand except that uracil (U) replaces thymidine (T) in the guide RNA.

[0160] An RGN's respective guide RNA is one or more RNA molecules (generally, one or two), that can bind to the RGN and guide the RGN to bind to a particular target nucleotide sequence, and in those embodiments wherein the RGN has nickase or nuclease activity, also cleave the target strand and/or the non-target strand. In general, a guide RNA comprises a CRISPR RNA (crRNA) and a trans-activating CRISPR RNA (tracrRNA), although some RGNs do not require a tracrRNA. Native guide RNAs that comprise both a crRNA and a tracrRNA generally comprise two separate RNA molecules that hybridize to each other through the repeat sequence of the crRNA and the anti-repeat sequence of the tracrRNA.

[0161] In some embodiments, a presently disclosed promoter is operably linked to a coding sequence for a CRISPR RNA. A CRISPR RNA (crRNA) comprises a spacer and a CRISPR repeat. The “spacer” has a nucleotide sequence that directly hybridizes with the non-target strand of a target nucleotide sequence of interest. The spacer is engineered to have full or partial complementarity with the non-target strand of a target sequence of interest. In some embodiments, the spacer can comprise from about 8 nucleotides to about 30 nucleotides, or more. For example, the spacer can be about 8, about 9, about 10, about 11, about 12, about 13, about 14, about 15, about 16, about 17, about 18, about 19, about 20, about 21, about 22, about 23, about 24, about 25, about 26, about 27, about 28, about 29, about 30, or more nucleotides in length. In some embodiments, the spacer is 8, 9, 10, 11, 12, 13, 14, 15, 16, 17, 18, 19, 20, 21, 22, 23, 24, 25, 26, 27, 28, 29, 30, or more nucleotides in length. In some embodiments, the spacer is about 10 to about 26 nucleotides in length, or about 12 to about 30 nucleotides in length. In some embodiments, the spacer is about 30 nucleotides in length. In some embodiments, the spacer is 10 to 26 nucleotides in length, or 12 to 30 nucleotides in length. In some embodiments, the spacer is 30 nucleotides in length. In some embodiments, the degree of complementarity between a spacer and the non-target strand of a target sequence, when optimally aligned using a suitable alignment algorithm, is between 50% and 99% or more, including but not limited to about or more than about 50%, about 60%, about 70%, about 75%, about 80%, about 81%, about 82%, about 83%, about 84%, about 85%, about 86%, about 87%, about 88%, about 89%, about 90%, about 91%, about 92%, about 93%, about 94%, about 95%, about 96%, about 97%, about 98%, about 99%, or more. In some embodiments, the degree of complementarity between a spacer and the non-target strand of a target sequence, when optimally aligned using a suitable alignment algorithm, is 50%, 60%, 70%, 75%, 80%, 81%, 82%, 83%, 84%, 85%, 86%, 87%, 88%, 89%, 90%, 91%, 92%, 93%, 94%, 95%, 96%, 97%, 98%, 99%, or more. In some embodiments, the spacer can be identical in sequence to the target strand of a target sequence. In some of those embodiments wherein the target sequence is a target DNA sequence, the spacer can be identical in sequence to the target strand of the target DNA sequence, with the exception of the thymidines (Ts) in the target strand being replaced by uracils (Us) in the spacer. In some embodiments, the spacer is free of secondary structure, which can be predicted using any suitable polynucleotide folding algorithm known in the art, including but not limited to mFold (see, e.g., Zuker and Stiegler (1981) Nucleic Acids Res. 9:133-148) and RNAfold (see, e.g., Gruber et al. (2008) Cell 106(1):23-24).

[0162] Along with a spacer, crRNAs further comprise a CRISPR RNA repeat. The CRISPR RNA repeat comprises a nucleotide sequence that forms a structure, either on its own or in concert with a hybridized tracrRNA, that is recognized by the RGN molecule. In some embodiments, the CRISPR RNA repeat can comprise from about 8 nucleotides to about 30 nucleotides, or more. For example, the CRISPR repeat can be about 8, about 9, about 10, about 11, about 12, about 13, about 14, about 15, about 16, about 17, about 18, about 19, about 20, about 21, about 22, about 23, about 24, about 25, about 26, about 27, about 28, about 29, about 30, or more nucleotides in length. In some embodiments, the CRISPR RNA repeat is 8, 9, 10, 11, 12, 13, 14, 15, 16, 17, 18, 19, 20, 21, 22, 23, 24, 25, 26, 27, 28, 29, 30, or more nucleotides in length. In some embodiments, the degree of complementarity between a CRISPR repeat and its corresponding tracrRNA, when optimally aligned using a suitable alignment algorithm, is about or more than about 50%, about 60%, about 70%, about 75%, about 80%, about 81%, about 82%, about 83%, about 84%, about 85%, about 86%, about 87%, about 88%, about 89%, about 90%, about 91%, about 92%, about 93%, about 94%, about 95%, about 96%, about 97%, about 98%, about 99%, or more. In some embodiments, the degree of complementarity between a CRISPR repeat and its corresponding tracrRNA, when optimally aligned using a suitable alignment algorithm, is 50%, 60%, 70%, 75%, 80%, 81%, 82%, 83%, 84%, 85%, 86%, 87%, 88%, 89%, 90%, 91%, 92%, 93%, 94%, 95%, 96%, 97%, 98%, 99%, or more.

[0163] In some embodiments, the crRNA that is expressed using the presently disclosed promoters (i.e., SEQ ID NOs: 1-10 or an active variant or fragment of any thereof) is not naturally-occurring. In some of these embodiments, the specific CRISPR repeat is not linked to the engineered spacer in nature and the CRISPR repeat is considered heterologous to the spacer. In some embodiments, the spacer is an engineered sequence that is not naturally occurring.

[0164] In some embodiments, a presently disclosed promoter (i.e., any one of SEQ ID NOs: 1-10 or an active variant or fragment of any thereof) is operably linked to a coding sequence for a tracrRNA. A trans-activating CRISPR RNA or tracrRNA molecule comprises a nucleotide sequence comprising a region that has sufficient complementarity to hybridize to a CRISPR repeat of a crRNA, which is referred to herein as the anti-repeat. In some embodiments, the tracrRNA molecule further comprises a region with secondary structure (e.g., stem-loop) or forms secondary structure upon hybridizing with its corresponding crRNA. In some embodiments, the region of the tracrRNA that is fully or partially complementary to a CRISPR repeat is at the 5′ end of the molecule and the 3′ end of the tracrRNA comprises secondary structure. This region of secondary structure generally comprises several hairpin structures, including the nexus hairpin, which is found adjacent to the anti-repeat. The nexus forms the core of the interactions between the guide RNA and the RGN, and is at the intersection between the guide RNA, the RGN, and the target DNA. The nexus hairpin often has a conserved nucleotide sequence in the base of the hairpin stem, with the motif UNANNC found in many nexus hairpins in tracrRNAs. There are often terminal hairpins at the 3′ end of the tracrRNA that can vary in structure and number, but often comprise a GC-rich Rho-independent transcriptional terminator hairpin followed by a string of U's at the 3′ end. See, for example, Briner et al. (2014) Molecular Cell 56:333-339, Briner and Barrangou (2016) Cold Spring Harb Protoc; doi: 10.1101/pdb.top090902, and U.S. Publication No. 2017/0275648, each of which is herein incorporated by reference in its entirety.

[0165] In some embodiments, the anti-repeat region of the tracrRNA that is fully or partially complementary to the CRISPR repeat comprises from about 8 nucleotides to about 30 nucleotides, or more. For example, the region of base pairing between the tracrRNA anti-repeat and the CRISPR repeat can be about 8, about 9, about 10, about 11, about 12, about 13, about 14, about 15, about 16, about 17, about 18, about 19, about 20, about 21, about 22, about 23, about 24, about 25, about 26, about 27, about 28, about 29, about 30, or more nucleotides in length. In some embodiments, the anti-repeat region of the tracrRNA that is fully or partially complementary to the CRISPR repeat sequence comprises from 8 nucleotides to 30 nucleotides, or more. In some embodiments, the region of base pairing between the tracrRNA anti-repeat and the CRISPR repeat is 6, 7, 8, 9, 10, 11, 12, 13, 14, 15, 16, 17, 18, 19, 20, 21, 22, 23, 24, 25, 26, 27, 28, 29, 30, or more nucleotides in length. In some embodiments, the degree of complementarity between a CRISPR repeat and its corresponding tracrRNA anti-repeat, when optimally aligned using a suitable alignment algorithm, is about or more than about 50%, about 60%, about 70%, about 75%, about 80%, about 81%, about 82%, about 83%, about 84%, about 85%, about 86%, about 87%, about 88%, about 89%, about 90%, about 91%, about 92%, about 93%, about 94%, about 95%, about 96%, about 97%, about 98%, about 99%, or more. In some embodiments, the degree of complementarity between a CRISPR repeat and its corresponding tracrRNA anti-repeat, when optimally aligned using a suitable alignment algorithm, is 50%, 60%, 70%, 75%, 80%, 81%, 82%, 83%, 84%, 85%, 86%, 87%, 88%, 89%, 90%, 91%, 92%, 93%, 94%, 95%, 96%, 97%, 98%, 99%, or more.

[0166] In some embodiments, the entire tracrRNA can comprise from about 60 nucleotides to more than about 210 nucleotides. For example, the tracrRNA can be about 50, about 55, about 60, about 65, about 70, about 75, about 80, about 85, about 90, about 95, about 100, about 105, about 110, about 115, about 120, about 125, about 130, about 135, about 140, about 150, about 160, about 170, about 180, about 190, about 200, about 210, or more nucleotides in length. In some embodiments, the entire tracrRNA comprises from 60 nucleotides to more than 140 nucleotides. In some embodiments, the tracrRNA is 50, 55, 60, 65, 70, 75, 80, 85, 90, 95, 100, 105, 110, 115, 120, 125, 130, 135, 140, 150, 160, 170, 180, 190, 200, 210, or more nucleotides in length. In some embodiments, the tracrRNA is about 80 to about 90 nucleotides in length, including about 80, about 81, about 82, about 83, about 84, about 85, about 86, about 87, about 88, about 89, and about 90 nucleotides in length. In some embodiments, the tracrRNA is 80 to 90 nucleotides in length, including 80, 81, 82, 83, 84, 85, 86, 87, 88, 89, and 90 nucleotides in length.

[0167] Two polynucleotide sequences can be considered to be substantially complementary when the two sequences hybridize to each other under stringent conditions. Likewise, an RGN is considered to bind to a particular target sequence within a sequence-specific manner if the guide RNA bound to the RGN binds to the target sequence under stringent conditions. By “stringent conditions” or “stringent hybridization conditions” is intended conditions under which the two polynucleotide sequences will hybridize to each other to a detectably greater degree than to other sequences (e.g., at least 2-fold over background). Stringent conditions are sequence-dependent and will be different in different circumstances. Typically, stringent conditions will be those in which the salt concentration is less than about 1.5 M Na ion, typically about 0.01 to 1.0 M Na ion concentration (or other salts) at pH 7.0 to 8.3, and the temperature is at least about 30° C. for short sequences (e.g., 10 to 50 nucleotides) and at least about 60° C. for long sequences (e.g., greater than 50 nucleotides). Stringent conditions may also be achieved with the addition of destabilizing agents such as formamide. Exemplary low stringency conditions include hybridization with a buffer solution of 30 to 35% formamide, 1 M NaCl, 1% SDS (sodium dodecyl sulfate) at 37° C., and a wash in 1× to 2×SSC (20×SSC=3.0 M NaCl/0.3 M trisodium citrate) at 50 to 55° C. Exemplary moderate stringency conditions include hybridization in 40 to 45% formamide, 1.0 M NaCl, 1% SDS at 37° C., and a wash in 0.5× to 1×SSC at 55 to 60° C. Exemplary high stringency conditions include hybridization in 50% formamide, 1 M NaCl, 1% SDS at 37° C., and a wash in 0.1×SSC at 60 to 65° C. Optionally, wash buffers may comprise about 0.1% to about 1% SDS. Duration of hybridization is generally less than about 24 hours, usually about 4 to about 12 hours. The duration of the wash time will be at least a length of time sufficient to reach equilibrium.

[0168] The Tm is the temperature (under defined ionic strength and pH) at which 50% of a complementary target sequence hybridizes to a perfectly matched sequence. For DNA-DNA hybrids, the Tm can be approximated from the equation of Meinkoth and Wahl (1984) Anal. Biochem. 138:267-284: Tm=81.5° C.+16.6 (log M)+0.41 (% GC)−0.61 (% form)−500/L; where M is the molarity of monovalent cations, % GC is the percentage of guanosine and cytosine nucleotides in the DNA, % form is the percentage of formamide in the hybridization solution, and L is the length of the hybrid in base pairs. Generally, stringent conditions are selected to be about 5° C. lower than the thermal melting point (Tm) for the specific sequence and its complement at a defined ionic strength and pH. However, severely stringent conditions can utilize a hybridization and/or wash at 1, 2, 3, or 4° C. lower than the thermal melting point (Tm); moderately stringent conditions can utilize a hybridization and/or wash at 6, 7, 8, 9, or 10° C. lower than the thermal melting point (Tm); low stringency conditions can utilize a hybridization and/or wash at 11, 12, 13, 14, 15, or 20° C. lower than the thermal melting point (Tm). Using the equation, hybridization and wash compositions, and desired Tm, those of ordinary skill will understand that variations in the stringency of hybridization and/or wash solutions are inherently described. An extensive guide to the hybridization of nucleic acids is found in Tijssen (1993) Laboratory Techniques in Biochemistry and Molecular Biology-Hybridization with Nucleic Acid Probes, Part I, Chapter 2 (Elsevier, New York); and Ausubel et al., eds. (1995) Current Protocols in Molecular Biology, Chapter 2 (Greene Publishing and Wiley-Interscience, New York). See Sambrook et al. (1989) Molecular Cloning: A Laboratory Manual (2d ed., Cold Spring Harbor Laboratory Press, Plainview, New York).

[0169] The term “sequence specific” can also refer to the binding of a RGN polypeptide to a target sequence at a greater frequency than binding to a randomized background sequence.

[0170] The presently disclosed promoters (i.e., SEQ ID NOs: 1-10 or an active variant or fragment of any thereof) can be used to express a guide RNA. The guide RNA can be a crRNA only (some RGNs do not require a tracrRNA and the crRNA can serve as a guide RNA), a single guide RNA, or a dual guide RNA. A single guide RNA comprises the crRNA and tracrRNA on a single molecule of RNA, whereas a dual-guide RNA system comprises a crRNA and a tracrRNA present on two distinct RNA molecules, hybridized to one another through at least a portion of the CRISPR repeat sequence of the crRNA and at least a portion of the tracrRNA (i.e., the antirepeat), which may be fully or partially complementary to the CRISPR repeat of the crRNA. In some of those embodiments wherein the guide RNA is a single guide RNA, the crRNA and tracrRNA are separated by a linker nucleotide sequence. In general, the linker nucleotide sequence is one that does not include complementary bases in order to avoid the formation of secondary structure within or comprising nucleotides of the linker nucleotide sequence. In some embodiments, the linker nucleotide sequence between the crRNA and tracrRNA is at least 3, at least 4, at least 5, at least 6, at least 7, at least 8, at least 9, at least 10, at least 11, at least 12, or more nucleotides in length. In some embodiments, the linker nucleotide sequence of a single guide RNA is at least 4 nucleotides in length. In some embodiments, the linker nucleotide sequence is the nucleotide sequence set forth as SEQ ID NO: 249.

[0171] The single guide RNA or dual-guide RNA can be synthesized chemically or via in vitro transcription. Assays for determining sequence-specific binding between an RGN and a guide RNA are known in the art and include, but are not limited to, in vitro binding assays between an expressed RGN and the guide RNA, which can be tagged with a detectable label (e.g., biotin) and used in a pull-down detection assay in which the guide RNA:RGN complex is captured via the detectable label (e.g., with streptavidin beads). A control guide RNA with an unrelated sequence or structure to the guide RNA can be used as a negative control for non-specific binding of the RGN to RNA.

[0172] Non-limiting examples of crRNAs and/or tracrRNAs that can be expressed with the presently disclosed promoters are provided in Table 1, along with their corresponding RNA-guided nucleases.

[0173] In some embodiments, the guide RNA can be introduced into a target cell, organelle, or embryo as an RNA molecule. In some embodiments, the guide RNA can be transcribed in vitro or chemically synthesized. In some of these embodiments, the nucleotide sequence encoding the guide RNA is operably linked to a presently disclosed promoter (i.e., SEQ ID NOs: 1-10 or an active variant or fragment of any thereof). In some embodiments, the promoter is heterologous to the guide RNA-encoding nucleotide sequence.

[0174] In some embodiments, the guide RNA can be introduced into a target cell, organelle, or embryo as a ribonucleoprotein complex, as described herein, wherein the guide RNA is bound to an RNA-guided nuclease polypeptide.

[0175] The guide RNA directs an associated RNA-guided nuclease to a particular target nucleotide sequence of interest through hybridization of the guide RNA to the target nucleotide sequence of interest. The target sequence can be bound (and in some embodiments, cleaved) by an RNA-guided nuclease in vitro or in a cell. A target nucleotide sequence can comprise DNA, RNA, or a combination of both and can be single-stranded or double-stranded. A target nucleotide sequence can be genomic DNA (i.e., chromosomal DNA), plasmid DNA, or an RNA molecule (e.g., messenger RNA, ribosomal RNA, transfer RNA, micro RNA, small interfering RNA). The target nucleotide sequence can be bound (and in some embodiments, cleaved) by an RNA-guided nuclease in vitro or in a cell. In those embodiments wherein the target sequence is a chromosomal sequence, the chromosomal sequence can be a nuclear, plastid, or mitochondrial chromosomal sequence. In some of the presently disclosed compositions and methods, the target sequence is within a target nucleic acid molecule that is double-stranded. In some embodiments, the target nucleotide sequence is unique in the target genome.

[0176] In some embodiments, the target nucleotide sequence is adjacent to a protospacer adjacent motif (PAM) and the target strand of the target sequence is the strand that comprises the PAM. While a protospacer adjacent motif can be within about 1 to about 10 nucleotides from the target sequence, including about 1, about 2, about 3, about 4, about 5, about 6, about 7, about 8, about 9, or about 10 nucleotides from the target sequence, generally, the PAM sequence is immediately adjacent to the target sequence and is immediately adjacent unless specified otherwise. In some embodiments, a PAM is within 1 to 10 nucleotides from the target sequence, including 1, 2, 3, 4, 5, 6, 7, 8, 9, or 10 nucleotides from the target sequence. The PAM can be 5′ or 3′ of the target sequence on its target strand. Generally, the PAM is a consensus sequence of about 3-4 nucleotides, but in some embodiments it can be 2, 3, 4, 5, 6, 7, 8, 9, or more nucleotides in length.

[0177] It is well-known in the art that PAM sequence specificity for a given nuclease enzyme is affected by enzyme concentration (see, e.g., Karvelis et al. (2015) Genome Biol 16:253), which may be modified by altering the promoter used to express the RGN, or the amount of ribonucleoprotein complex delivered to the cell, organelle, or embryo.

[0178] Upon recognizing its corresponding PAM sequence, the RGN can cleave one or both strands of a target DNA sequence at a specific cleavage site. As used herein, a cleavage site is made up of the two particular nucleotides within a target sequence between which the strand of a target DNA sequence is cleaved by an RGN. The cleavage site can comprise the 1^{st} and 2^{nd}, 2^{nd} and 3^{rd}, 3^{rd} and 4^{th}, 4^{th} and 5^{th}, 5^{th} and 6^{th}, 7^{th} and 8^{th}, or 8^{th} and 9^{th} nucleotides from the PAM in either the 5′ or 3′ direction. In some embodiments, the cleavage site may be over 10, 11, 12, 13, 14, 15, 16, 17, 18, 19, or 20 nucleotides from the PAM in either the 5′ or 3′ direction. As RGNs can cleave a target DNA sequence resulting in staggered ends, in some embodiments, the cleavage site is defined based on the distance of the two nucleotides from the PAM on the target strand of the target DNA sequence and for the non-target strand, the distance of the two nucleotides from the complement of the PAM.

ii. Gene Silencing RNAs

[0179] In addition to guide RNAs, crRNAs, and tracrRNAs, the presently disclosed promoters (i.e., SEQ ID NOs: 1-10 or an active variant or fragment of any thereof) can be used to express other types of RNAs, including those non-polypeptide coding RNAs that are involved in RNA interference and/or gene silencing. Thus, in some embodiments a presently disclosed promoter is operably linked to a gene silencing RNA. As used herein, a “gene silencing RNA” refers to an RNA molecule that serves to inhibit or reduce the expression of a polypeptide-encoding or RNA-encoding gene (e.g., microRNA) through post-transcriptional mechanisms. Non-limiting examples of gene silencing RNAs include a shRNA, siRNA, antisense RNA, or the like.

[0180] As used herein, the term “shRNA” or “short hairpin RNA” refers to an artificial RNA molecule comprising a hairpin that can be used to silence gene expression via RNA interference. A shRNA is generally less than 500 nucleotides in length and in some embodiments is less than 400 nucleotides, less than 300 nucleotides, less than 200 nucleotides, or less than 100 nucleotides. Generally, a stretch of at least 15 nucleotides, at least 20 nucleotides, at least 30 nucleotides, at least 50 nucleotides, or at least 100 nucleotides is base paired with a complementary sequence located on the same RNA molecule, wherein said sequence and complementary sequence are separated by an unpaired region which forms a single-stranded loops above the stem structure created by the two regions of base complementarity. In some embodiments, the loop region is 4 to 15 nucleotides in length, including 4, 5, 6, 7, 8, 9, 10, 11, 12, 13, 14, and 15 nucleotides in length. In some embodiments, the stem structure comprising the two regions of base complementarity is 15 to 500 bp long, or 15 to 300 bp long, or 15 to 100 bp long, including but not limited to 15, 16, 17, 18, 19, 20, 21, 22, 23, 24, 25, 30, 35, 40, 45, 50, 55, 60, 65, 70, 75, 80, 85, 90, 95, and 100. The stem region comprising the two regions of base complementarity comprise a homologous sequence and complementary sequence to a target sequence to be inhibited.

[0181] As used herein, the term “siRNA” or “small interfering RNA” or “short interfering RNA” refers to a double-stranded non-coding RNA molecule that silences genes through the RNA interference pathway. Typically, siRNAs are 20-27 base pairs in length, similar to miRNA. In some embodiments, siRNA comprise two overhanding nucleotides on each end. The presently disclosed promoters can be used to express siRNA through the individual expression of each strand of an siRNA molecule. Thus, a first presently disclosed promoter can be operably linked to a sequence encoding one strand of an siRNA molecule and a second presently disclosed promoter (which may be identical or different from the first promoter) is operably linked to a sequence encoding the complementary strand of an siRNA molecule.

[0182] As used herein, the term “antisense RNA” refers to an RNA transcript that is complementary to all or part of a target primary transcript or mRNA, and that blocks the expression of a target gene (see, e.g., U.S. Pat. No. 5,107,065). The complementarity of an antisense RNA may be with any part of the specific gene transcript, i.e., at the 5′ non-coding sequence, 3′ non-coding sequence, introns, or the coding sequence. According to the present invention, an antisense RNA is transcribed from a coding sequence through the operable linkage of the coding sequence with a presently disclosed promoter. In some embodiments, the antisense RNA is transcribed through the recruitment of pol III. In some embodiments, the antisense RNA is transcribed through the recruitment of pol II.

### B. Polypeptide-Encoding Sequences

[0183] Given that the presently disclosed promoters can, in some embodiments, function as a pol II promoter by recruiting RNA polymerase II, in some embodiments, the presently disclosed promoters (i.e., SEQ ID NOs: 1-10 or an active variant or fragment of any thereof) are used to express a polypeptide-encoding sequence and generate a pre-mRNA molecule that can then be processed to add a poly(A) tail and spliced if comprising introns, and eventually translated into a polypeptide. The polypeptide-encoding sequence may comprise introns or splice sites or may be a cDNA lacking splice sites. An example of a canonical splice site is AGGT.

[0184] The polypeptide-encoding sequence can be codon optimized for expression in an organism of interest. A “codon-optimized” coding sequence is a polynucleotide coding sequence having its frequency of codon usage designed to mimic the frequency of preferred codon usage or transcription conditions of a particular host cell. Expression in the particular host cell or organism is enhanced as a result of the alteration of one or more codons at the nucleic acid level such that the translated amino acid sequence is not changed. Nucleic acid molecules can be codon optimized, either wholly or in part. Codon tables and other references providing preference information for a wide range of organisms are available in the art (see, e.g., Campbell and Gown (1990) Plant Physiol. 92:1-11 for a discussion of plant-preferred codon usage). Methods are available in the art for synthesizing plant-preferred genes or mammalian (for example human) codon-optimized coding sequences. See, for example, U.S. Pat. Nos. 5,380,831, and 5,436,391, and Murray et al. (1989) Nucleic Acids Res. 17:477-498, herein incorporated by reference.

[0185] In some embodiments, the polypeptide-encoding sequence that is operably linked to a presently disclosed promoter is a coding sequence for an RNA-guided nuclease.

### V. RNA-Guided Nucleases

[0186] In those embodiments wherein the vector or polynucleotide comprises a presently disclosed promoter (i.e., SEQ ID NOs: 1-10 or an active variant or fragment of any thereof) operably linked to a coding sequence that encodes a crRNA, a tracrRNA, or a guideRNA, the vector or polynucleotide can further comprise a coding sequence for an RNA-guided nuclease, such as one capable of binding to the guide RNA, crRNA, or tracrRNA. In some of these embodiments, the coding sequence for the RGN is operably linked to a pol II promoter. In some of these embodiments, the pol II promoter is a presently disclosed promoter or active variant thereof capable of recruiting pol II. In other embodiments, the pol II promoter used to express the RGN is another pol II promoter known in the art. The pol II promoter can be selected based on the desired outcome, such as a constitutive, inducible, growth stage-specific, cell type-specific, tissue-preferred, tissue-specific, or other promoters for expression in the organism of interest. See, for example, promoters set forth in WO 99/43838 and in U.S. Pat. Nos. 8,575,425; 7,790,846; 8,147,856; 8,586832; 7,772,369; 7,534,939; 6,072,050; 5,659,026; 5,608,149; 5,608,144; 5,604,121; 5,569,597; 5,466,785; 5,399,680; 5,268,463; 5,608,142; and 6,177,611; herein incorporated by reference.

[0187] For expression in plants, constitutive promoters also include CaMV 35S promoter (Odell et al. (1985) Nature 313:810-812); rice actin (McElroy et al. (1990) Plant Cell 2:163-171); ubiquitin (Christensen et al. (1989) Plant Mol. Biol. 12:619-632 and Christensen et al. (1992) Plant Mol. Biol. 18:675-689); pEMU (Last et al. (1991) Theor. Appl. Genet. 81:581-588); and MAS (Velten et al. (1984) EMBO J. 3:2723-2730).

[0188] Examples of inducible promoters are the AdhI promoter which is inducible by hypoxia or cold stress, the Hsp70 promoter which is inducible by heat stress, the PPDK promoter and the pepcarboxylase promoter which are both inducible by light. Also useful are promoters which are chemically inducible, such as the In2-2 promoter which is safener induced (U.S. Pat. No. 5,364,780), the Axig1 promoter which is auxin induced and tapetum specific but also active in callus (PCT US01/22169), the steroid-responsive promoters (see, for example, the ERE promoter which is estrogen induced, and the glucocorticoid-inducible promoter in Schena et al. (1991) Proc. Natl. Acad. Sci. USA 88:10421-10425 and McNellis et al. (1998) Plant J. 14(2):247-257) and tetracycline-inducible and tetracycline-repressible promoters (see, for example, Gatz et al. (1991)Mol. Gen. Genet. 227:229-237, and U.S. Pat. Nos. 5,814,618 and 5,789,156), herein incorporated by reference.

[0189] Tissue-specific or tissue-preferred promoters can be utilized to target expression of an expression construct within a particular tissue. In some embodiments, the tissue-specific or tissue-preferred promoters are active in plant tissue. Examples of promoters under developmental control in plants include promoters that initiate transcription preferentially in certain tissues, such as leaves, roots, fruit, seeds, or flowers. A “tissue specific” promoter is a promoter that initiates transcription only in certain tissues. Unlike constitutive expression of genes, tissue-specific expression is the result of several interacting levels of gene regulation. As such, promoters from homologous or closely related plant species can be preferable to use to achieve efficient and reliable expression of transgenes in particular tissues. In some embodiments, the expression comprises a tissue-preferred promoter. A “tissue preferred” promoter is a promoter that initiates transcription preferentially, but not necessarily entirely or solely in certain tissues.

[0190] In some embodiments, the coding sequence for an RGN is operably linked to a cell type-specific promoter. A “cell type specific” promoter is a promoter that primarily drives expression in certain cell types in one or more organs. Some examples of plant cells in which cell type specific promoters functional in plants may be primarily active include, for example, BETL cells, vascular cells in roots, leaves, stalk cells, and stem cells. The nucleic acid molecules can also include cell type preferred promoters. A “cell type preferred” promoter is a promoter that primarily drives expression mostly, but not necessarily entirely or solely in certain cell types in one or more organs. Some examples of plant cells in which cell type preferred promoters functional in plants may be preferentially active include, for example, BETL cells, vascular cells in roots, leaves, stalk cells, and stem cells.

[0191] The coding sequence for an RGN can be operably linked to a promoter sequence that is recognized by a phage RNA polymerase for example, for in vitro mRNA synthesis. In such embodiments, the in vitro-transcribed RNA can be purified for use in the methods described herein. For example, the promoter sequence can be a T7, T3, or SP6 promoter sequence or a variation of a T7, T3, or SP6 promoter sequence. In such embodiments, the expressed protein or a ribonucleoprotein complex can be purified for use in the methods of genome modification described herein.

[0192] RNA-guided nucleases (RGNs) allow for the targeted manipulation of specific site(s) within a genome and are useful in the context of gene targeting for therapeutic and research applications. In a variety of organisms, including mammals, RNA-guided nucleases have been used for genome engineering by stimulating non-homologous end joining and homologous recombination, for example. The compositions and methods described herein are useful for creating single- or double-stranded breaks in polynucleotides, modifying polynucleotides, detecting a particular site within a polynucleotide, or modifying the expression of a particular gene.

[0193] In some embodiments, the RNA-guided nucleases used in the presently disclosed compositions and methods can alter gene expression by modifying a target gene comprising a target sequence. In specific embodiments, RNA-guided nucleases are directed to the target sequence by a guide RNA (gRNA) as part of a Clustered Regularly Interspaced Short Palindromic Repeats (CRISPR) RNA-guided nuclease system. RGNs are considered “RNA-guided” because guide RNAs form a complex with the RNA-guided nucleases to direct the RNA-guided nuclease to bind to a target sequence and in some embodiments, introduce a single-stranded or double-stranded break at the target sequence. After the target sequence has been cleaved, the break can be repaired such that the DNA sequence of the target sequence is modified during the repair process. Thus, provided herein are methods for using the presently disclosed compositions comprising RNA-guided nucleases or nucleic acids encoding the same to modify a target sequence in the DNA of host cells. For example, RNA-guided nucleases can be used to modify a target sequence at a genomic locus of eukaryotic cells or prokaryotic cells.

[0194] As used herein, the term “RNA-guided nuclease” or “RGN” refers to a polypeptide that binds to a particular target nucleotide sequence in a nucleic acid molecule in a sequence-specific manner and is directed to the target sequence by a guide RNA molecule that is complexed with the polypeptide and hybridizes with the non-target strand of the target sequence. Although an RNA-guided nuclease can be capable of cleaving the target sequence upon binding, the term RNA-guided nuclease also encompasses nuclease-dead RNA-guided nucleases or RNA-guided nucleic acid binding proteins that are capable of binding to, but not cleaving, a target sequence. Cleavage of a target sequence by an RNA-guided nuclease can result in a single- or double-stranded break. RNA-guided nucleases only capable of cleaving a single strand of a double-stranded nucleic acid molecule are referred to herein as nickases. Non-limiting examples of RGNs or variants thereof that can be used in the presently disclosed compositions and methods, along with corresponding crRNA sequences and tracrRNA sequences (if needed), are presented in Table 1 below.

TABLE 1
Non-limiting examples of RNA-guided nucleases
and corresponding crRNA repeat sequences,
tracrRNA sequences, and PAM sequences.

| | RGN SEQ | crRNA repeat | | |
|---|---|---|---|---|
| RGN Name | ID NO: | sequence | tracrRNA | PAM |
| APG05083.1 | 62 | 63 | 64 | 65 |
| APG07433.1 | 53 | 66 | 67 | 65 |
| APG07513.1 | 68 | 69 | 70 | 65 |
| APG08290.1 | 52 | 71 | 72 | 73 |
| APG05459.1 | 74 | 75 | 76 | 77 |
| APG04583.1 | 78 | 79 | 80 | 81 |
| APG01688.1 | 82 | 83 | 84 | 85 |
| APG00969 | 86 | 87 | 88 | 89 |
| APG03128 | 90 | 91 | 92 | 93 |
| APG09748 | 94 | 95 | 96 | 97 |
| APG00771 | 98 | 99 | 100 | 101 |
| APG02789 | 102 | 103 | 104 | 105 |
| APG09106 | 106 | 107 | 108 | 97 |
| APG05733.1 | 109 | 110 | 111 | 112 |
| APG06207.1 | 113 | 114 | 115 | 116 |
| APG01647.1 | 117 | 118 | 119 | 120 |
| APG08032.1 | 121 | 122 | 123 | 124 |
| APG05712.1 | 125 | 126 | 127 | 128 |
| APG01658.1 | 129 | 130 | 131 | 132 |
| APG06498.1 | 133 | 134 | 135 | 136 |
| APG09106.1 | 137 | 138 | 139 | 140 |
| APG09882.1 | 141 | 142 | 143 | 144 |
| APG02675.1 | 145 | 146 | 147 | 116 |
| APG01405.1 | 148 | 149 | 150 | 151 |
| APG06250.1 | 152 | 153 | 154 | 155 |
| APG06877.1 | 156 | 157 | 158 | 112 |
| APG09053.1 | 159 | 160 | 161 | 162 |
| APG04293.1 | 163 | 164 | 165 | 166 |
| APG01308.1 | 167 | 168 | 169 | 170 |
| APG06646.1 | 171 | 172 | 173 | 166 |
| APG09624 | 174 | 175 | 176 | ND |
| APG05405 | 177 | 178 | 179 | ND |
| APG06622 | 180 | 181 | 182 | 183 |
| APG02787 | 184 | 185 | 186 | 187 |
| APG06248 | 188 | 189 | 190 | 191 |
| APG06007 | 192 | 193 | 194 | 195 |
| APG02874 | 196 | 197 | 198 | 199 |
| APG03850 | 200 | 201 | 202 | 203 |
| APG07553 | 204 | 205 | 206 | 207 |
| APG03031 | 208 | 209 | 210 | 199 |
| APG09208 | 211 | 212 | 213 | 214 |
| APG05586 | 215 | 216 | 217 | 218 |
| APG08770 | 219 | 220 | 221 | 218 |
| APG08167 | 222 | 223 | 224 | 225 |
| APG01604 | 226 | 227 | 228 | 225 |
| APG03021 | 229 | 230 | 231 | 232 |
| APG06015 | 233 | 234 | 235 | 236 |
| APG09344 | 237 | 238 | 239 | 240 |
| APG07991 | 241 | 242 | 243 | 244 |
| APG01868 | 245 | 246 | 247 | 244 |
| APG02998 | 248 | 249 | 250 | 244 |
| APG09298 | 251 | 252 | 253 | 254 |
| APG06251 | 255 | 252 | 253 | 254 |
| APG03066 | 256 | 252 | 253 | 254 |
| APG01560 | 257 | 252 | 253 | 254 |
| APG02777 | 258 | 252 | 253 | 254 |
| APG05761 | 259 | 252 | 253 | 254 |
| APG02479 | 260 | 252 | 253 | 254 |
| APG08385 | 261 | 252 | 253 | 254 |
| APG09217 | 262 | 252 | 253 | 254 |
| APG06657 | 263 | 252 | 253 | 254 |
| APG05586 | 264 | 252 | 253 | 254 |
| APG07433.1 deletion | 265 | 266 | 267 | 268 |
| variant | | | | |
| APG08290.1 deletion | 269 | 270 | 271 | 272 |
| variant | | | | |

* ND: not determined

[0195] According to the present invention, a target nucleotide sequence is bound by an RNA-guided nuclease. The non-target strand of the target DNA sequence hybridizes with the guide RNA associated with the RNA-guided nuclease. The target strand and/or the non-target strand of the target DNA sequence can then be subsequently cleaved by the RNA-guided nuclease if the polypeptide possesses nuclease activity. The terms “cleave” or “cleavage” refer to the hydrolysis of at least one phosphodiester bond within the backbone of one or both strands of a target DNA sequence that can result in either single-stranded or double-stranded breaks within the target DNA sequence. RGNs can cleave nucleotides within a polynucleotide, functioning as an endonuclease or can be an exonuclease, removing successive nucleotides from the end (the 5′ and/or the 3′ end) of a polynucleotide. In other embodiments, the disclosed RGNs can cleave nucleotides of a target polynucleotide within any position of a polynucleotide and thus function as both an endonuclease and exonuclease. The cleavage of a target polynucleotide by RGNs can result in staggered breaks or blunt ends.

[0196] The RNA-guided nucleases can be wild-type sequences derived from bacterial or archaeal species. Alternatively, the RNA-guided nucleases can be variants or fragments of wild-type polypeptides. The wild-type RGN can be modified to alter nuclease activity or alter PAM specificity, for example. In some embodiments, the RNA-guided nuclease is not naturally-occurring.

[0197] In some embodiments, the RNA-guided nuclease functions as a nickase, only cleaving a single strand of the target DNA sequence. Such RNA-guided nucleases have a single functioning nuclease domain. In some embodiments, the nickase is capable of cleaving the target strand or the non-target strand of the target DNA sequence. In some of these embodiments, additional nuclease domains have been mutated such that the nuclease activity is reduced or eliminated. In embodiments wherein a nickase is used, in order to effect a double-stranded cleavage of a target DNA sequence, two nickases are needed, each of which nicks a single strand within the target DNA sequence.

[0198] In other embodiments, the RNA-guided nuclease lacks nuclease activity altogether, and is referred to herein as nuclease-dead or nuclease inactive. Any method known in the art for introducing mutations into an amino acid sequence, such as PCR-mediated mutagenesis and site-directed mutagenesis, can be used for generating nickases or nuclease-dead RGNs. See, e.g., U.S. Publ. No. 2014/0068797 and U.S. Pat. No. 9,790,490; each of which is incorporated by reference in its entirety.

[0199] RNA-guided nucleases that lack nuclease activity can be used to deliver a fused polypeptide, polynucleotide, or small molecule payload to a particular genomic location. In some of these embodiments, the RGN polypeptide or guide RNA can be fused to a detectable label to allow for detection of a particular sequence. As a non-limiting example, a nuclease-dead RGN can be fused to a detectable label (e.g., fluorescent protein) and targeted to a particular sequence associated with a disease to allow for detection of the disease-associated sequence.

[0200] Alternatively, nuclease-dead RGNs can be targeted to particular genomic locations to alter the expression of a desired gene. In some embodiments, the binding of a nuclease-dead RNA-guided nuclease to a target sequence within a target gene results in the reduction in expression of the target or a gene under transcriptional control by the target sequence by interfering with the binding of RNA polymerase or transcription factors within the targeted genomic region. In other embodiments, the RGN (e.g., a nuclease-dead RGN) or its complexed guide RNA further comprises an expression modulator that, upon binding to a target sequence, serves to either repress or activate the expression of the target gene or a gene under transcriptional control by the target sequence. In some of these embodiments, the expression modulator modulates the expression of the target gene or regulated gene through epigenetic mechanisms.

[0201] In other embodiments, the nuclease-dead RGNs or an RGN with nickase activity can be targeted to particular genomic locations to modify the sequence of a target polynucleotide through fusion to a base-editing polypeptide, for example a deaminase polypeptide or active variant or fragment thereof, that directly chemically modifies (e.g., deaminates) a nucleobase, resulting in conversion from one nucleobase to another. The base-editing polypeptide can be fused to the RGN at its N-terminal or C-terminal end. Additionally, the base-editing polypeptide may be fused to the RGN via a peptide linker. A non-limiting example of a deaminase polypeptide that is useful for such compositions and methods includes a cytosine deaminase or an adenine deaminase (such as the adenine deaminase base editor described in Gaudelli et al. (2017) Nature 551:464-471, U.S. Publ. Nos. 2017/0121693 and 2018/0073012, and International Publ. No. WO 2018/027078, or any of the deaminases disclosed in International Publ. Nos. WO 2020/139783 and WO 2022/056254, and International Application No. PCT/US2022/21271 filed Mar. 22, 2022, each of which is herein incorporated by reference in its entirety). Further, it is known in the art that certain fusion proteins between an RGN and a base-editing enzyme (e.g., cytosine deaminase) may also comprise at least one uracil stabilizing polypeptide that increases the mutation rate of a cytidine, deoxycytidine, or cytosine to a thymidine, deoxythymidine, or thymine in a nucleic acid molecule by a deaminase. Non-limiting examples of uracil stabilizing polypeptides include those disclosed in International Publ. No. WO 2021/217002, which is herein incorporated by reference in its entirety, including USP2 (SEQ ID NO: 59) and a uracil glycosylase inhibitor (UGI) domain (SEQ ID NO: 58), which may increase base editing efficiency. Therefore, a fusion protein may comprise an RGN, a deaminase, and optionally at least one uracil stabilizing polypeptide, such as UGI or USP2. In some embodiments, the RGN that is fused to the base-editing polypeptide is a nickase that cleaves the DNA strand that is not acted upon by the base-editing polypeptide (e.g., deaminase).

[0202] RNA-guided nucleases that are fused to a polypeptide or domain can be separated or joined by a linker. The term “linker,” as used herein, refers to a chemical group or a molecule linking two molecules or moieties, e.g., a binding domain and a cleavage domain of a nuclease. In some embodiments, a linker joins a gRNA binding domain of an RNA guided nuclease and a base-editing polypeptide, such as a deaminase. In some embodiments, a linker joins a nuclease-dead RGN and a deaminase. Typically, the linker is positioned between, or flanked by, two groups, molecules, or other moieties and connected to each one via a covalent bond, thus connecting the two. In some embodiments, the linker is an amino acid or a plurality of amino acids (e.g., a peptide or protein). In some embodiments, the linker is an organic molecule, group, polymer, or chemical moiety. In some embodiments, the linker is 5-100 amino acids in length, for example, 5,6,7, 8,9, 10, 11, 12, 13, 14, 15, 16, 17, 18, 19, 20, 21, 22, 23, 24, 25, 26, 27, 28, 29, 30, 30-35, 35-40, 40-45, 45-50, 50-60, 60-70, 70-80, 80-90, 90-100, 100-150, or 150-200 amino acids in length. Longer or shorter linkers are also contemplated.

[0203] RNA-guided nucleases can comprise at least one nuclear localization signal (NLS) to enhance transport of the RGN to the nucleus of a cell. Nuclear localization signals are known in the art and generally comprise a stretch of basic amino acids (see, e.g., Lange et al., J Biol. Chem. (2007) 282:5101-5105). In some embodiments, the RGN comprises 2, 3, 4, 5, 6 or more nuclear localization signals. The nuclear localization signal(s) can be a heterologous NLS. Non-limiting examples of nuclear localization signals useful for the presently disclosed RGNs are the nuclear localization signals of SV40 Large T-antigen, nucleoplasmin, and c-Myc (see, e.g., Ray et al. (2015) Bioconjug Chem 26(6):1004-7). In some embodiments, the RGN comprises the NLS sequence set forth as SEQ ID NO: 60 and/or 61. The RGN can comprise one or more NLS sequences at its N-terminus, C-terminus, or both the N-terminus and C-terminus. For example, the RGN can comprise two NLS sequences at the N-terminal region and four NLS sequences at the C-terminal region.

[0204] Other localization signal sequences known in the art that localize polypeptides to particular subcellular location(s) can also be used to target the RGNs, including, but not limited to, plastid localization sequences, mitochondrial localization sequences, and dual-targeting signal sequences that target to both the plastid and mitochondria (see, e.g., Nassoury and Morse (2005) Biochim Biophys Acta 1743:5-19; Kunze and Berger (2015) Front Physiol dx.doi.org/10.3389/fphys.2015.00259; Herrmann and Neupert (2003) IUBMB Life 55:219-225; Soll (2002) Curr Opin Plant Biol 5:529-535; Carrie and Small (2013) Biochim BiophysActa 1833:253-259; Carrie et al. (2009) FEBSJ276:1187-1195; Silva-Filho (2003) Curr Opin Plant Biol 6:589-595; Peeters and Small (2001) Biochim Biophys Acta 1541:54-63; Murcha et al. (2014) J Exp Bot 65:6301-6335; Mackenzie (2005) Trends Cell Biol 15:548-554; Glaser et al. (1998) Plant Mol Biol 38:311-338).

[0205] In some embodiments, the RNA-guided nuclease comprises at least one cell-penetrating domain that facilitates cellular uptake of the RGN. Cell-penetrating domains are known in the art and generally comprise stretches of positively charged amino acid residues (i.e., polycationic cell-penetrating domains), alternating polar amino acid residues and non-polar amino acid residues (i.e., amphipathic cell-penetrating domains), or hydrophobic amino acid residues (i.e., hydrophobic cell-penetrating domains) (see, e.g., Milletti F. (2012) Drug Discov Today 17:850-860). A non-limiting example of a cell-penetrating domain is the trans-activating transcriptional activator (TAT) from the human immunodeficiency virus 1.

[0206] The nuclear localization signal, plastid localization signal, mitochondrial localization signal, dual-targeting localization signal, and/or cell-penetrating domain can be located at the amino-terminus (N-terminus), the carboxyl-terminus (C-terminus), or in an internal location of the RNA-guided nuclease.

[0207] The RGN can be fused to an effector domain, such as a cleavage domain, a deaminase, or an expression modulator domain, either directly or indirectly via a linker peptide. Such a domain can be located at the N-terminus, the C-terminus, or an internal location of the RNA-guided nuclease. In some of these embodiments, the RGN component of the fusion protein is a nuclease-dead RGN or a nickase.

[0208] In some embodiments, the RGN fusion protein comprises a cleavage domain, which is any domain that is capable of cleaving a polynucleotide (i.e., RNA, DNA, or RNA/DNA hybrid) and includes, but is not limited to, restriction endonucleases and homing endonucleases, such as Type IIS endonucleases (e.g., FokI) (see, e.g., Belfort et al. (1997) Nucleic Acids Res. 25:3379-3388; Linn et al. (eds.) Nucleases, Cold Spring Harbor Laboratory Press, 1993).

[0209] In other embodiments, the RGN fusion protein comprises a deaminase that deaminates a nucleobase, resulting in conversion from one nucleobase to another, and includes, but is not limited to, a cytosine deaminase or an adenine deaminase (see, e.g., Gaudelli et al. (2017) Nature 551:464-471, U.S. Publ. Nos. 2017/0121693 and 2018/0073012, U.S. Pat. No. 9,840,699, International Publ. No. WO 2018/027078, and International Publ. No. WO 2018/027078, or any of the deaminases disclosed in International Publ. Nos. WO 2020/139783 and WO 2022/056254, and International Appl. No. PCT/US2022/021271 filed Mar. 22, 2022, each of which is herein incorporated by reference in its entirety).

[0210] In some embodiments, the effector domain of the RGN fusion protein can be an expression modulator domain, which is a domain that either serves to upregulate or downregulate transcription. The expression modulator domain can be an epigenetic modification domain, a transcriptional repressor domain or a transcriptional activation domain.

[0211] In some of these embodiments, the expression modulator of the RGN fusion protein comprises an epigenetic modification domain that covalently modifies DNA or histone proteins to alter histone structure and/or chromosomal structure without altering the DNA sequence, leading to changes in gene expression (i.e., upregulation or downregulation). Non-limiting examples of epigenetic modifications include acetylation or methylation of lysine residues, arginine methylation, serine and threonine phosphorylation, and lysine ubiquitination and sumoylation of histone proteins, and methylation and hydroxymethylation of cytosine residues in DNA. Non-limiting examples of epigenetic modification domains include histone acetyltransferase domains, histone deacetylase domains, histone methyltransferase domains, histone demethylase domains, DNA methyltransferase domains, and DNA demethylase domains.

[0212] In other embodiments, the expression modulator of the fusion protein comprises a transcriptional repressor domain, which interacts with transcriptional control elements and/or transcriptional regulatory proteins, such as RNA polymerases and transcription factors, to reduce or terminate transcription of at least one gene. Transcriptional repressor domains are known in the art and include, but are not limited to, Sp1-like repressors, IκB, and Krüppel associated box (KRAB) domains.

[0213] In yet other embodiments, the expression modulator of the fusion protein comprises a transcriptional activation domain, which interacts with transcriptional control elements and/or transcriptional regulatory proteins, such as RNA polymerases and transcription factors, to increase or activate transcription of at least one gene. Transcriptional activation domains are known in the art and include, but are not limited to, a herpes simplex virus VP16 activation domain and an NFAT activation domain.

[0214] The RGN polypeptide can comprise a detectable label or a purification tag. The detectable label or purification tag can be located at the N-terminus, the C-terminus, or an internal location of the RNA-guided nuclease, either directly or indirectly via a linker peptide. In some of these embodiments, the RGN component of the fusion protein is a nuclease-dead RGN. In other embodiments, the RGN component of the fusion protein is an RGN with nickase activity.

[0215] A detectable label is a molecule that can be visualized or otherwise observed. The detectable label may be fused to the RGN as a fusion protein (e.g., fluorescent protein) or may be a small molecule conjugated to the RGN polypeptide that can be detected visually or by other means. Detectable labels that can be fused to the presently disclosed RGNs as a fusion protein include any detectable protein domain, including but not limited to, a fluorescent protein or a protein domain that can be detected with a specific antibody. Non-limiting examples of fluorescent proteins include green fluorescent proteins (e.g., GFP, EGFP, ZsGreen1) and yellow fluorescent proteins (e.g., YFP, EYFP, ZsYellow1). Non-limiting examples of small molecule detectable labels include radioactive labels, such as ³H and ³⁵S.

[0216] RGN polypeptides can also comprise a purification tag, which is any molecule that can be utilized to isolate a protein or fused protein from a mixture (e.g., biological sample, culture medium). Non-limiting examples of purification tags include biotin, myc, maltose binding protein (MBP), glutathione-S-transferase (GST), and 3×FLAG tag.

### VI. Variants and Fragments of Polypeptides and Polynucleotides

[0217] The present disclosure provides active variants and fragments of a naturally-occurring (i.e., wild-type) promoter, the nucleotide sequence of which is set forth as SEQ ID NOs: 1-5, as well as active variants and fragments of a truncated version of these wild-type sequences. The nucleotide sequences of the truncated promoters are set forth as SEQ ID NOs: 6-10 and the present disclose contemplates active variants and fragments of these truncated promoters.

[0218] While the activity of a variant or fragment may be altered compared to the polynucleotide of interest (e.g., promoter) or polypeptide of interest, the variant and fragment should retain the functionality of the polynucleotide or polypeptide of interest. For example, a variant or fragment may have increased activity, decreased activity, different spectrum of activity or any other alteration in activity when compared to the polynucleotide or polypeptide of interest.

[0219] Fragments and variants of any one of SEQ ID NOs: 1-10 will retain transcription initiation activity of an operably linked coding sequence. In some embodiments, fragments and variants of any one of SEQ ID NOs: 1-10 will retain the ability to recruit pol III and initiate transcription therefrom. In some embodiments, fragments and variants of any one of SEQ ID NOs: 1-10 will retain the ability to recruit pol II and initiate transcription therefrom. In some embodiments, active variants or fragments of the presently disclosed promoters comprise a TATA box sequence, an OCT sequence, a SPH sequence, and/or a PSE sequence. In some embodiments, active variants or fragments of any one of SEQ ID NOs: 1-5 will lack the putative nucleosomal sequence (e.g., the internal sequence that has been removed from SEQ ID NOs: 1-5 to generate SEQ ID NOs: 6-10, respectively).

[0220] Fragments and variants of naturally-occurring RGN polypeptides, such as those disclosed herein in Table 1, will retain sequence-specific, RNA-guided nucleic acid-binding activity. In some embodiments, fragments and variants of naturally-occurring RGN polypeptides, such as those disclosed herein in Table 1, will retain nuclease activity (single-stranded or double-stranded).

[0221] Fragments and variants of naturally-occurring CRISPR repeats, such as those disclosed herein in Table 1, will retain the ability, when part of a guide RNA (comprising a tracrRNA), to bind to and guide an RNA-guided nuclease (complexed with the guide RNA) to a target nucleotide sequence in a sequence-specific manner.

[0222] Fragments and variants of naturally-occurring tracrRNAs, such as those disclosed herein in Table 1, will retain the ability, when part of a guide RNA (comprising a CRISPR RNA), to guide an RNA-guided nuclease (complexed with the guide RNA) to a target nucleotide sequence in a sequence-specific manner.

[0223] The term “fragment” refers to a portion of a polynucleotide or polypeptide sequence of the invention. “Fragments” or “biologically active portions” include polynucleotides comprising a sufficient number of contiguous nucleotides to retain the biological activity (e.g., initiating transcription). In some embodiments, two or more fragments can be combined to generate an active variant. “Fragments” or “biologically active portions” include polypeptides comprising a sufficient number of contiguous amino acid residues to retain the biological activity (e.g., binding to a target nucleotide sequence in a sequence-specific manner when complexed with a guide RNA). Fragments of RGN proteins include those that are shorter than the full-length sequences due to the use of an alternate downstream start site. A biologically active fragment of a promoter can be a polynucleotide that comprises at least 10 contiguous nucleotides of any one of SEQ ID NOs: 1-10, including but not limited to, about 10 to about 290, about 20 to about 290, about 30 to about 290, about 40 to about 290, about 45 to about 290, about 50 to about 290, about 55 to about 290, about 60 to about 290, about 65 to about 290, about 67 to about 290, 10, 11, 12, 13, 14, 15, 16, 17, 18, 19, 20, 21, 22, 23, 24, 25, 26, 27, 28, 29, 30, 31, 32, 33, 34, 35, 36, 37, 38, 39, 40, 41, 42, 43, 44, 45, 46, 47, 48, 49 50, 51, 52, 53, 54, 55, 56, 57, 58, 59, 60, 61, 62, 63, 64, 65, 66, 67, 68, 69, 70, 71, 72, 73, 74, 75, 76, 77, 78, 79, 80, 81, 82, 83, 84, 85, 86, 87, 88, 89, 90, 91, 92, 93, 94, 95, 96, 97, 98, 99, 100, 101, 102, 103, 104, 105, 106, 107, 108, 109, 110, 111, 112, 113, 114, 115, 120, 125, 130, 135, 140, 145, 150, 160, 170, 180, 190,200, 210, 220, 230, 240, 250, 260, 270, 280, 290, or 300 contiguous nucleotides of any one of SEQ ID NOs: 1-10.

[0224] In general, “variants” is intended to mean substantially similar sequences. For polynucleotides, a variant comprises a deletion and/or addition of one or more nucleotides at one or more internal sites within the native polynucleotide and/or a substitution of one or more nucleotides at one or more sites in the native polynucleotide. As used herein, a “native” or “wild type” polynucleotide or polypeptide comprises a naturally occurring nucleotide sequence or amino acid sequence, respectively. For polynucleotides, conservative variants include those sequences that, because of the degeneracy of the genetic code, encode the native amino acid sequence of the gene of interest. Naturally occurring allelic variants such as these can be identified with the use of well-known molecular biology techniques, as, for example, with polymerase chain reaction (PCR) and hybridization techniques as outlined below. Variant polynucleotides also include synthetically derived polynucleotides, such as those generated, for example, by using site-directed mutagenesis but which still encode the polypeptide or the polynucleotide of interest. Generally, variants of a particular polynucleotide disclosed herein will have at least about 40%, 45%, 50%, 55%, 60%, 65%, 70%, 75%, 80%, 85%, 90%, 91%, 92%, 93%, 94%, 95%, 96%, 97%, 98%, 99% or more sequence identity to that particular polynucleotide as determined by sequence alignment programs and parameters described elsewhere herein.

[0225] Variants of a particular polynucleotide disclosed herein (i.e., the reference polynucleotide) can also be evaluated by comparison of the percent sequence identity between the polypeptide encoded by a variant polynucleotide and the polypeptide encoded by the reference polynucleotide. Percent sequence identity between any two polypeptides can be calculated using sequence alignment programs and parameters described elsewhere herein. Where any given pair of polynucleotides disclosed herein is evaluated by comparison of the percent sequence identity shared by the two polypeptides they encode, the percent sequence identity between the two encoded polypeptides is at least about 30%, 31%, 32%, 33%, 34%, 35%, 36%, 37%, 38%, 39%, 40%, 45%, 50%, 55%, 60%, 65%, 70%, 75%, 80%, 85%, 90%, 91%, 92%, 93%, 94%, 95%, 96%, 97%, 98%, 99% or more sequence identity.

[0226] A biologically active variant of a promoter of the invention may differ by as few as about 1-15 nucleotides, as few as about 1-10, such as about 6-10, as few as 5, as few as 4, as few as 3, as few as 2, or as few as 1 nucleotide. In specific embodiments, the promoter can comprise a 5′ or 3′ truncation, which can comprise at least a deletion of 10, 11, 12, 13, 14, 15, 16, 17, 18, 19, 20, 21, 22, 23, 24, 25, 26, 27, 28, 29, 30, 31, 32, 33, 34, 35, 36, 37, 38, 39, 40, 41, 42, 43, 44, 45, 46, 47, 48, 49, 50, 51, 52, 53, 54, 55, 56, 57, 58, 59, 60, 61, 62, 63, 64, 65, 70, 75, 80, 85, 90, 95, 100, 150, 200, 250, nucleotides or more from either the 5′ or 3′ end of the polynucleotide.

[0227] In some embodiments, the presently disclosed promoters comprise a nucleotide sequence having at least 30%, 31%, 32%, 33%, 34%, 35%, 36%, 37%, 38%, 39%, 40%, 45%, 50%, 55%, 60%, 65%, 70%, 75%, 80%, 85%, 90%, 91%, 92%, 93%, 94%, 95%, 96%, 97%, 98%, 99% or more sequence identity to the nucleotide sequence set forth as any one of SEQ ID NOs: 1-10.

[0228] It is recognized that modifications may be made to the promoters provided herein, as well as the RGN polypeptides, CRISPR repeats, and tracrRNAs provided herein in Table 1, creating variant proteins and polynucleotides. Changes designed by man may be introduced through the application of site-directed mutagenesis techniques. Alternatively, native, as yet-unknown or as yet unidentified polynucleotides and/or polypeptides structurally and/or functionally-related to the sequences disclosed herein may also be identified that fall within the scope of the present invention. Conservative amino acid substitutions may be made in nonconserved regions that do not alter or improve the function of the RGN proteins listed in Table 1.

[0229] Variant polynucleotides and proteins also encompass sequences and proteins derived from a mutagenic and recombinogenic procedure such as DNA shuffling. With such a procedure, one or more different sequences is manipulated to create a new sequence possessing the desired properties. In this manner, libraries of recombinant polynucleotides are generated from a population of related sequence polynucleotides comprising sequence regions that have substantial sequence identity and can be homologously recombined in vitro or in vivo. Strategies for such DNA shuffling are known in the art. See, for example, Stemmer (1994) Proc. Natl. Acad. Sci. USA 91:10747-10751; Stemmer (1994) Nature 370:389-391; Crameri et al. (1997) Nature Biotech. 15:436-438; Moore et al. (1997) J. Mol. Biol. 272:336-347; Zhang et al. (1997) Proc. Natl. Acad. Sci. USA 94:4504-4509; Crameri et al. (1998) Nature 391:288-291; and U.S. Pat. Nos. 5,605,793 and 5,837,458. A “shuffled” nucleic acid is a nucleic acid produced by a shuffling procedure such as any shuffling procedure set forth herein. Shuffled nucleic acids are produced by recombining (physically or virtually) two or more nucleic acids (or character strings), for example in an artificial, and optionally recursive, fashion. Generally, one or more screening steps are used in shuffling processes to identify nucleic acids of interest; this screening step can be performed before or after any recombination step. In some (but not all) shuffling embodiments, it is desirable to perform multiple rounds of recombination prior to selection to increase the diversity of the pool to be screened. The overall process of recombination and selection are optionally repeated recursively. Depending on context, shuffling can refer to an overall process of recombination and selection, or, alternately, can simply refer to the recombinational portions of the overall process.

[0230] As used herein, “sequence identity” or “identity” in the context of two polynucleotides or polypeptide sequences makes reference to the residues in the two sequences that are the same when aligned for maximum correspondence over a specified comparison window. When percentage of sequence identity is used in reference to proteins it is recognized that residue positions which are not identical often differ by conservative amino acid substitutions, where amino acid residues are substituted for other amino acid residues with similar chemical properties (e.g., charge or hydrophobicity) and therefore do not change the functional properties of the molecule. When sequences differ in conservative substitutions, the percent sequence identity may be adjusted upwards to correct for the conservative nature of the substitution. Sequences that differ by such conservative substitutions are said to have “sequence similarity” or “similarity”. Means for making this adjustment are well known to those of skill in the art. Typically, this involves scoring a conservative substitution as a partial rather than a full mismatch, thereby increasing the percentage sequence identity. Thus, for example, where an identical amino acid is given a score of 1 and a non-conservative substitution is given a score of zero, a conservative substitution is given a score between zero and 1. The scoring of conservative substitutions is calculated, e.g., as implemented in the program PC/GENE (Intelligenetics, Mountain View, California).

[0231] As used herein, “percentage of sequence identity” means the value determined by comparing two optimally aligned sequences over a comparison window, wherein the portion of the polynucleotide sequence in the comparison window may comprise additions or deletions (i.e., gaps) as compared to the reference sequence (which does not comprise additions or deletions) for optimal alignment of the two sequences. The percentage is calculated by determining the number of positions at which the identical nucleic acid base or amino acid residue occurs in both sequences to yield the number of matched positions, dividing the number of matched positions by the total number of positions in the window of comparison, and multiplying the result by 100 to yield the percentage of sequence identity.

[0232] Unless otherwise stated, sequence identity/similarity values provided herein refer to the value obtained using GAP Version 10 using the following parameters: % identity and % similarity for a nucleotide sequence using GAP Weight of 50 and Length Weight of 3, and the nwsgapdna.cmp scoring matrix; % identity and % similarity for an amino acid sequence using GAP Weight of 8 and Length Weight of 2, and the BLOSUM62 scoring matrix; or any equivalent program thereof. By “equivalent program” is intended any sequence comparison program that, for any two sequences in question, generates an alignment having identical nucleotide or amino acid residue matches and an identical percent sequence identity when compared to the corresponding alignment generated by GAP Version 10.

[0233] Two sequences are “optimally aligned” when they are aligned for similarity scoring using a defined amino acid substitution matrix (e.g., BLOSUM62), gap existence penalty and gap extension penalty so as to arrive at the highest score possible for that pair of sequences. Amino acid substitution matrices and their use in quantifying the similarity between two sequences are well-known in the art and described, e.g., in Dayhoff et al. (1978) “A model of evolutionary change in proteins.” In “Atlas of Protein Sequence and Structure,” Vol. 5, Suppl. 3 (ed. M. O. Dayhoff), pp. 345-352. Natl. Biomed. Res. Found., Washington, D.C. and Henikoff et al. (1992) Proc. Natl. Acad. Sci. USA 89:10915-10919. The BLOSUM62 matrix is often used as a default scoring substitution matrix in sequence alignment protocols. The gap existence penalty is imposed for the introduction of a single amino acid gap in one of the aligned sequences, and the gap extension penalty is imposed for each additional empty amino acid position inserted into an already opened gap. The alignment is defined by the amino acids positions of each sequence at which the alignment begins and ends, and optionally by the insertion of a gap or multiple gaps in one or both sequences, so as to arrive at the highest possible score. While optimal alignment and scoring can be accomplished manually, the process is facilitated by the use of a computer-implemented alignment algorithm, e.g., gapped BLAST 2.0, described in Altschul et al. (1997) Nucleic Acids Res. 25:3389-3402, and made available to the public at the National Center for Biotechnology Information Website (www.ncbi.nlm.nih.gov). Optimal alignments, including multiple alignments, can be prepared using, e.g., PSI-BLAST, available through www.ncbi.nlm.nih.gov and described by Altschul et al. (1997) Nucleic Acids Res. 25:3389-3402.

[0234] With respect to an amino acid sequence that is optimally aligned with a reference sequence, an amino acid residue “corresponds to” the position in the reference sequence with which the residue is paired in the alignment. The “position” is denoted by a number that sequentially identifies each amino acid in the reference sequence based on its position relative to the N-terminus. Owing to deletions, insertion, truncations, fusions, etc., that must be taken into account when determining an optimal alignment, in general the amino acid residue number in a test sequence as determined by simply counting from the N-terminal will not necessarily be the same as the number of its corresponding position in the reference sequence. For example, in a case where there is a deletion in an aligned test sequence, there will be no amino acid that corresponds to a position in the reference sequence at the site of deletion. Where there is an insertion in an aligned reference sequence, that insertion will not correspond to any amino acid position in the reference sequence. In the case of truncations or fusions there can be stretches of amino acids in either the reference or aligned sequence that do not correspond to any amino acid in the corresponding sequence.

### VII. Methods for Expressing an RNA or Polypeptide

[0235] The presently disclosed promoters (i.e., SEQ ID NOs: 1-10 or an active variant or fragment of any thereof) can be used to express an RNA or polypeptide through operable linkage with a coding sequence. Methods for preparing such an expression construct and methods for expressing an RNA or polypeptide are therefore provided. Methods for making an RGN ribonucleotide complex and purifying the same are further provided.

[0236] Methods for preparing an expression construct comprise inserting a coding sequence into a nucleic acid molecule comprising a presently disclosed promoter or inserting a presently disclosed promoter into a nucleic acid molecule comprising a coding sequence such that the coding sequence is operably linked to the promoter. Any method known in the art to insert a nucleotide sequence (e.g., coding sequence or promoter) into a nucleic acid molecule can be used. The expression construct can be prepared or generated in vitro or in vivo. A non-limiting example of in vitro expression construct preparation involves cleavage of the nucleic acid molecule with a restriction endonuclease, for example, to generate blunt ends or overhangs (5′ or 3′) that are compatible with the overhangs on the sequence to be inserted, followed by ligation. A non-limiting example of a method for preparing an expression construct in vivo is to use a gene editing approach (e.g., zinc finger nuclease, TALEN, RGN) to generate blunt or staggered ends in a nucleic acid molecule and a donor polynucleotide with blunt ends or compatible overhangs that can be inserted into the cleavage site.

[0237] In vitro or in vivo methods can also be used for expressing an RNA or polypeptide. In vitro methods for expressing an RNA comprise contacting an expression construct comprising a presently disclosed promoter operably linked to an RNA-coding sequence with an RNA polymerase III and ribonucleotide triphosphates (also referred to as rNTPs) (i.e., rATP, rUTP, rCTP, and rGTP). In vitro methods for expression of a polypeptide comprise first making an mRNA in vitro by contacting an expression construction comprising a presently disclosed promoter operably linked to a polypeptide-coding sequence with an RNA polymerase II and (rNTPs). In some embodiments, a cap analog is also present in the reaction mix to generate a capped mRNA. In some embodiments, the method further comprises contacting the capped mRNA with a poly(A) polyermase to generate a capped and tailed mRNA. The capped and tailed mRNA can then be contacted in vitro with a cell-free lysate, such as wheat germ extract, rabbit reticulocyte extracts, or E. coli extracts, or purified components to generate an in vitro translated polypeptide. In some embodiments, in vitro transcription and translation are performed in a single-step process wherein the expression construct is contacted with all of the components needed for both in vitro transcription and translation.

[0238] In vivo methods for expressing an RNA or polypeptide comprise introducing into a cell an expression construct comprising a presently disclosed promoter operably linked to a coding sequence. The coding sequence can be for an RNA or a polypeptide.

[0239] By “introducing” is intended to introduce the nucleotide construct to the host cell in such a manner that the construct gains access to the interior of the host cell. The methods of the invention do not require a particular method for introducing a nucleotide construct to a host organism, only that the nucleotide construct gains access to the interior of at least one cell of the host organism. The host cell can be a eukaryotic or prokaryotic cell. In some embodiments, the eukaryotic host cell is a plant cell, a mammalian cell, an avian cell, or an insect cell. In some embodiments, the eukaryotic cell is a human cell. In some embodiments, the eukaryotic cell is a cell of hematopoietic origin, such as an immune cell (i.e., a cell of the innate or adaptive immune system), including but not limited to a B cell, a T cell, a natural killer (NK) cell, a pluripotent stem cell, an induced pluripotent stem cell, a chimeric antigen receptor T (CAR-T) cell, a monocyte, a macrophage, and a dendritic cell.

[0240] Methods for introducing nucleotide constructs into plants and other host cells are known in the art including, but not limited to, stable transformation methods, transient transformation methods, and virus-mediated methods.

[0241] The methods result in a transformed organism, such as a plant, including whole plants, as well as plant organs (e.g., leaves, stems, roots, etc.), seeds, plant cells, propagules, embryos and progeny of the same. Plant cells can be differentiated or undifferentiated (e.g. callus, suspension culture cells, protoplasts, leaf cells, root cells, phloem cells, pollen).

[0242] “Transgenic organisms” or “transformed organisms” or “stably transformed” organisms or cells or tissues refers to organisms that have incorporated or integrated a promoter of the invention, and in some embodiments, an operably linked coding sequence. It is recognized that other exogenous or endogenous nucleic acid sequences or DNA fragments may also be incorporated into the host cell. Agrobacterium- and biolistic-mediated transformation remain the two predominantly employed approaches for transformation of plant cells. However, transformation of a host cell may be performed by infection, transfection, microinjection, electroporation, microprojection, biolistics or particle bombardment, electroporation, silica/carbon fibers, ultrasound mediated, PEG mediated, calcium phosphate co-precipitation, polycation DMSO technique, DEAE dextran procedure, and viral mediated, liposome mediated and the like. Viral-mediated introduction of a polynucleotide encoding an RGN, crRNA, and/or tracrRNA includes retroviral, lentiviral, adenoviral, and adeno-associated viral mediated introduction and expression, as well as the use of Caulimoviruses, Geminiviruses, and RNA plant viruses.

[0243] Transformation protocols as well as protocols for introducing polypeptides or polynucleotide sequences into plants may vary depending on the type of host cell (e.g., monocot or dicot plant cell) targeted for transformation. Methods for transformation are known in the art and include those set forth in U.S. Pat. Nos. 8,575,425; 7,692,068; 8,802,934; 7,541,517; each of which is herein incorporated by reference. See, also, Rakoczy-Trojanowska, M. (2002) Cell Mol Biol Lett. 7:849-858; Jones et al. (2005) Plant Methods 1:5; Rivera et al. (2012) Physics of Life Reviews 9:308-345; Bartlett et al. (2008) Plant Methods 4:1-12; Bates, G. W. (1999) Methods in Molecular Biology 111:359-366; Binns and Thomashow (1988) Annual Reviews in Microbiology 42:575-606; Christou, P. (1992) The Plant Journal 2:275-281; Christou, P. (1995) Euphytica 85:13-27; Tzfira et al. (2004) TRENDS in Genetics 20:375-383; Yao et al. (2006) Journal of Experimental Botany 57:3737-3746; Zupan and Zambryski (1995) Plant Physiology 107:1041-1047; Jones et al. (2005) Plant Methods 1:5.

[0244] Transformation may result in stable or transient incorporation of the nucleic acid into the cell. “Stable transformation” is intended to mean that the nucleotide construct introduced into a host cell integrates into the genome of the host cell and is capable of being inherited by the progeny thereof. “Transient transformation” is intended to mean that a polynucleotide is introduced into the host cell and does not integrate into the genome of the host cell.

[0245] Methods for transformation of chloroplasts are known in the art. See, for example, Svab et al. (1990) Proc. Nail. Acad. Sci. USA 87:8526-8530; Svab and Maliga (1993) Proc. Natl. Acad. Sci. USA 90:913-917; Svab and Maliga (1993) EMBO J. 12:601-606. The method relies on particle gun delivery of DNA containing a selectable marker and targeting of the DNA to the plastid genome through homologous recombination. Additionally, plastid transformation can be accomplished by transactivation of a silent plastid-borne transgene by tissue-preferred expression of a nuclear-encoded and plastid-directed RNA polymerase. Such a system has been reported in McBride et al. (1994) Proc. Natl. Acad. Sci. USA 91:7301-7305.

[0246] The cells that have been transformed may be grown into a transgenic organism, such as a plant, in accordance with conventional ways. See, for example, McCormick et al. (1986) Plant Cell Reports 5:81-84. These plants may then be grown, and either pollinated with the same transformed strain or different strains, and the resulting hybrid having constitutive expression of the desired phenotypic characteristic identified. Two or more generations may be grown to ensure that expression of the desired phenotypic characteristic is stably maintained and inherited and then seeds harvested to ensure expression of the desired phenotypic characteristic has been achieved. In this manner, the present invention provides transformed seed (also referred to as “transgenic seed”) having a nucleotide construct of the invention, for example, an expression cassette of the invention, stably incorporated into their genome.

[0247] Alternatively, cells that have been transformed may be introduced into an organism. These cells could have originated from the organism, wherein the cells are transformed in an ex vivo approach.

[0248] The sequences provided herein may be used for transformation of any plant species, including, but not limited to, monocots and dicots. Examples of plants of interest include, but are not limited to, corn (maize), sorghum, wheat, sunflower, tomato, crucifers, peppers, potato, cotton, rice, soybean, sugarbeet, sugarcane, tobacco, barley, and oilseed rape, Brassica sp., alfalfa, rye, millet, safflower, peanuts, sweet potato, cassava, coffee, coconut, pineapple, citrus trees, cocoa, tea, banana, avocado, fig, guava, mango, olive, papaya, cashew, macadamia, almond, oats, vegetables, ornamentals, and conifers.

[0249] Vegetables include, but are not limited to, tomatoes, lettuce, green beans, lima beans, peas, and members of the genus Curcumis such as cucumber, cantaloupe, and musk melon. Ornamentals include, but are not limited to, azalea, hydrangea, hibiscus, roses, tulips, daffodils, petunias, carnation, poinsettia, and chrysanthemum. In some embodiments, plants of the present invention are crop plants (for example, maize, sorghum, wheat, sunflower, tomato, crucifers, peppers, potato, cotton, rice, soybean, sugarbeet, sugarcane, tobacco, barley, oilseed rape, etc.).

[0250] As used herein, the term plant includes plant cells, plant protoplasts, plant cell tissue cultures from which plants can be regenerated, plant calli, plant clumps, and plant cells that are intact in plants or parts of plants such as embryos, pollen, ovules, seeds, leaves, flowers, branches, fruit, kernels, ears, cobs, husks, stalks, roots, root tips, anthers, and the like. Grain is intended to mean the mature seed produced by commercial growers for purposes other than growing or reproducing the species. Progeny, variants, and mutants of the regenerated plants are also included within the scope of the invention, provided that these parts comprise the introduced polynucleotides. Further provided is a processed plant product or byproduct that retains the sequences disclosed herein, including for example, soymeal.

[0251] Polynucleotides comprising the presently disclosed promoters, and in some embodiments, and operably linked coding sequence can also be used to transform any prokaryotic species, including but not limited to, archaea and bacteria (e.g., Bacillus sp., Klebsiella sp. Streptomyces sp., Rhizobium sp., Escherichia sp., Pseudomonas sp., Salmonella sp., Shigella sp., Vibrio sp., Yersinia sp., Mycoplasma sp., Agrobacterium, Lactobacillus sp.).

[0252] Polynucleotides comprising the presently disclosed promoters, and in some embodiments, and operably linked coding sequence can be used to transform any eukaryotic species, including but not limited to animals (e.g., mammals, insects, fish, birds, and reptiles), fungi, amoeba, algae, and yeast.

[0253] Conventional viral and non-viral based gene transfer methods can be used to introduce nucleic acids in mammalian, insect, or avian cells or target tissues. Such methods can be used to administer nucleic acids to cells in culture, or in a host organism. Non-viral vector delivery systems include DNA plasmids, RNA (e.g. a transcript of a vector described herein), naked nucleic acid, and nucleic acid complexed with a delivery vehicle, such as a liposome. Viral vector delivery systems include DNA and RNA viruses, which have either episomal or integrated genomes after delivery to the cell. For a review of gene therapy procedures, see Anderson, Science 256: 808-813 (1992); Nabel & Feigner, TIBTECH 11:211-217 (1993); Mitani & Caskey, TIBTECH 11:162-166 (1993); Dillon, TIBTECH 11:167-175 (1993); Miller, Nature 357:455-460 (1992); Van Brunt, Biotechnology 6(10): 1149-1154 (1988); Vigne, Restorative Neurology and Neuroscience 8:35-36 (1995); Kremer & Perricaudet, British Medical Bulletin 51(1):31-44 (1995); Haddada et al., in Current Topics in Microbiology and Immunology, Doerfler and Bohm (eds) (1995); and Yu et al., Gene Therapy 1:13-26 (1994).

[0254] Methods of non-viral delivery of nucleic acids include lipofection, nucleofection, microinjection, biolistics, virosomes, liposomes, immunoliposomes, polycation or lipid: nucleic acid conjugates, naked DNA, artificial virions, and agent-enhanced uptake of DNA. Lipofection is described in e.g., U.S. Pat. Nos. 5,049,386, 4,946,787; and 4,897,355) and lipofection reagents are sold commercially (e.g., Transfectam™ and Lipofectin™). Cationic and neutral lipids that are suitable for efficient receptor-recognition lipofection of polynucleotides include those of Feigner, WO 91/17424; WO 91/16024. Delivery can be to cells (e.g. in vitro or ex vivo administration) or target tissues (e.g. in vivo administration). The preparation of lipid:nucleic acid complexes, including targeted liposomes such as immunolipid complexes, is well known to one of skill in the art (see, e.g., Crystal, Science 270:404-410 (1995); Blaese et al., Cancer Gene Ther. 2:291-297 (1995); Behr et al., Bioconjugate Chem. 5:382-389 (1994); Remy et al., Bioconjugate Chem. 5:647-654 (1994); Gao et al., Gene Therapy 2:710-722 (1995); Ahmad et al., Cancer Res. 52:4817-4820 (1992); U.S. Pat. Nos. 4,186,183, 4,217,344, 4,235,871, 4,261,975, 4,485,054, 4,501,728, 4,774,085, 4,837,028, and 4,946,787).

[0255] The use of RNA or DNA viral based systems for the delivery of nucleic acids takes advantage of highly evolved processes for targeting a virus to specific cells in the body and trafficking the viral payload to the nucleus. Viral vectors can be administered directly to patients (in vivo) or they can be used to treat cells in vitro, and the modified cells may optionally be administered to patients (ex vivo). Conventional viral based systems could include retroviral, lentivirus, adenoviral, adeno-associated and herpes simplex virus vectors for gene transfer. Integration in the host genome is possible with the retrovirus, lentivirus, and adeno-associated virus gene transfer methods, often resulting in long term expression of the inserted transgene. Additionally, high transduction efficiencies have been observed in many different cell types and target tissues.

[0256] The tropism of a retrovirus can be altered by incorporating foreign envelope proteins, expanding the potential target population of target cells. Lentiviral vectors are retroviral vectors that are able to transduce or infect non-dividing cells and typically produce high viral titers. Selection of a retroviral gene transfer system would therefore depend on the target tissue. Retroviral vectors are comprised of cis-acting long terminal repeats with packaging capacity for up to 6-10 kb of foreign sequence. The minimum cis-acting LTRs are sufficient for replication and packaging of the vectors, which are then used to integrate the therapeutic gene into the target cell to provide permanent transgene expression. Widely used retroviral vectors include those based upon murine leukemia virus (MuLV), gibbon ape leukemia virus (GaLV), Simian Immuno deficiency virus (SIV), human immuno deficiency virus (HIV), and combinations thereof (see, e.g., Buchscher et al., J. Viral. 66:2731-2739 (1992); Johann et al., J. Viral. 66:1635-1640 (1992); Sommnerfelt et al., Viral. 176:58-59 (1990); Wilson et al., J. Viral. 63:2374-2378 (1989); Miller et al., 1. Viral. 65:2220-2224 (1991); PCT/US94/05700).

[0257] In applications where transient expression is preferred, adenoviral based systems may be used. Adenoviral based vectors are capable of very high transduction efficiency in many cell types and do not require cell division. With such vectors, high titer and levels of expression have been obtained. This vector can be produced in large quantities in a relatively simple system. Adeno-associated virus (“AAV”) vectors may also be used to transduce cells with target nucleic acids, e.g., in the in vitro production of nucleic acids and peptides, and for in vivo and ex vivo gene therapy procedures (see, e.g., West et al., Virology 160:38-47 (1987); U.S. Pat. No. 4,797,368; WO 93/24641; Katin, Human Gene Therapy 5:793-801 (1994); Muzyczka, 1. Clin. Invest. 94:1351 (1994). Construction of recombinant AAV vectors are described in a number of publications, including U.S. Pat. No. 5,173,414; Tratschin et al., Mol. Cell. Biol. 5:3251-3260 (1985); Tratschin, et al., Mol. Cell. Biol. 4:2072-2081 (1984); Hermonat & Muzyczka, PNAS 81:6466-6470 (1984); and Samulski et al., 1. Viral. 63:03822-3828 (1989). Packaging cells are typically used to form virus particles that are capable of infecting a host cell. Such cells include 293 cells, which package adenovirus, and ψJ2 cells or PA317 cells, which package retrovirus.

[0258] Viral vectors used in gene therapy are usually generated by producing a cell line that packages a nucleic acid vector into a viral particle. The vectors typically contain the minimal viral sequences required for packaging and subsequent integration into a host, other viral sequences being replaced by an expression cassette for the polynucleotide(s) to be expressed. The missing viral functions are typically supplied in trans by the packaging cell line. For example, AAV vectors used in gene therapy typically only possess ITR sequences from the AAV genome which are required for packaging and integration into the host genome. Viral DNA is packaged in a cell line, which contains a helper plasmid encoding the other AAV genes, namely rep and cap, but lacking ITR sequences.

[0259] The cell line may also be infected with adenovirus as a helper. The helper virus promotes replication of the AAV vector and expression of AAV genes from the helper plasmid. The helper plasmid is not packaged in significant amounts due to a lack of ITR sequences. Contamination with adenovirus can be reduced by, e.g., heat treatment to which adenovirus is more sensitive than AAV. Additional methods for the delivery of nucleic acids to cells are known to those skilled in the art. See, for example, US20030087817, incorporated herein by reference.

[0260] In some embodiments, a host cell is transiently or non-transiently transfected with one or more vectors described herein. In some embodiments, a cell is transfected as it naturally occurs in a subject. In some embodiments, a cell that is transfected is taken from a subject. In some embodiments, the cell is derived from cells taken from a subject, such as a cell line. In some embodiments, the cell line may be mammalian, insect, or avian cells. A wide variety of cell lines for tissue culture are known in the art. Examples of cell lines include, but are not limited to, C8161, CCRF-CEM, MOLT, mIMCD-3, NHDF, HeLaS3, Huh1, Huh4, Huh7, HUVEC, HASMC, HEKn, HEKa, MiaPaCell, Panel, PC-3, TFl, CTLL-2, CIR, Rat6, CVI, RPTE, AlO, T24, 182, A375, ARH-77, Calul, SW480, SW620, SKOV3, SK-UT, CaCo2, P388D1, SEM-K2, WEHI-231, HB56, TIB55, lurkat, 145.01, LRMB, Bcl-1, BC-3, IC21, DLD2, Raw264.7, NRK, NRK-52E, MRC5, MEF, Hep G2, HeLa B, HeLa T4. COS, COS-1, COS-6, COS-M6A, BS-C-1 monkey kidney epithelial, BALB/3T3 mouse embryo fibroblast, 3T3 Swiss, 3T3-L1, 132-d5 human fetal fibroblasts; 10.1 mouse fibroblasts, 293-T, 3T3, 721, 9L, A2780, A2780ADR, A2780cis, A172, A20, A253, A431, A-549, ALC, B16, B35, BCP-I cells, BEAS-2B, bEnd.3, BHK-21, BR 293, BxPC3, C3H-10T1/2, C6/36, Cal-27, CHO, CHO-7, CHO-IR, CHO-K1, CHO-K2, CHO-T, CHO Dhfr−/−, COR-L23, COR-L23/CPR, COR-L235010, CORL23/R23, COS-7, COV-434, CML T1, CMT, CT26, D17, DH82, DU145, DuCaP, EL4, EM2, EM3, EMT6/AR1, EMT6/AR10.0, FM3, H1299, H69, HB54, HB55, HCA2, HEK-293, HeLa, Hepalclc7, HL-60, HMEC, HT-29, Jurkat, lY cells, K562 cells, Ku812, KCL22, KGl, KYOl, LNCap, Ma-Mel 1-48, MC-38, MCF-7, MCF-10A, MDA-MB-231, MDA-MB-468, MDA-MB-435, MDCKII, MDCKII, MOR/0.2R, MONO-MAC 6, MTD-IA, MyEnd, NCI-H69/CPR, NCI-H69/LX10, NCI-H69/LX20, NCI-H69/LX4, NIH-3T3, NALM-1, NW-145, OPCN/OPCT cell lines, Peer, PNT-IA/PNT 2, RenCa, RIN-5F, RMA/RMAS, Saos-2 cells, Sf-9, SkBr3, T2, T-47D, T84, THPl cell line, U373, U87, U937, VCaP, Vero cells, WM39, WT-49, X63, YAC-1, YAR, and transgenic varieties thereof. Cell lines are available from a variety of sources known to those with skill in the art (see, e.g., the American Type Culture Collection (ATCC) (Manassas, Va.)).

[0261] In some embodiments, a cell transfected with one or more vectors described herein is used to establish a new cell line comprising one or more vector-derived sequences. In some embodiments, a cell transiently transfected with a polynucleotide comprising a presently disclosed promoter, and in some embodiments, an operably linked coding sequence (such as by transient transfection of one or more vectors, or transfection with RNA), or modified through the activity of an RGN system, is used to establish a new cell line comprising cells containing the modification but lacking any other exogenous sequence. In some embodiments, cells transiently or non-transiently transfected with one or more vectors described herein, or cell lines derived from such cells are used in assessing one or more test compounds.

[0262] In some embodiments, one or more vectors described herein are used to produce a non-human transgenic animal or transgenic plant. In some embodiments, the transgenic animal is a mammal, such as a mouse, rat, hamster, rabbit, cow, or pig. In some embodiments, the transgenic animal is a bird, such as a chicken or a duck. In some embodiments, the transgenic animal is an insect, such as a mosquito or a tick.

[0263] Methods for making an RGN ribonucleoprotein complex are also provided. These methods can comprise introducing an expression construct comprising a presently disclosed promoter (i.e., SEQ ID NOs: 1-10 or an active variant or fragment of any thereof) operably linked to a guide RNA-encoding sequence into a cell that comprises an RGN. In some embodiments, methods for making an RGN ribonucleoprotein complex comprise introducing into a cell a first expression construct comprising a pol III promoter (such as a presently disclosed promoter) operably linked to a guide RNA-encoding sequence and a second expression construct comprising a pol II promoter (such as a presently disclosed promoter) operably linked to an RGN-coding sequence. In some of these embodiments, the first and second expression constructs are located on a single vector. In other embodiments, the first and second expression cassettes are located on separate vectors. In some embodiments, methods for making an RGN ribonucleoprotein complex comprise introducing into a cell: (i) a chemically synthesized guide RNA or a chemically synthesized polynucleotide encoding the guide RNA; and (ii) an expression construct comprising a pol II promoter (such as a presently disclosed promoter) operably linked to an RGN-coding sequence. In some embodiments, methods for making an RGN ribonucleoprotein complex comprise introducing into a cell: (i) an expression construct comprising a pol III promoter (such as a presently disclosed promoter) operably linked to a guide RNA-encoding sequence and a polynucleotide encoding an RGN. In some of these embodiments, the polynucleotide encoding an RGN is an mRNA molecule. In some embodiments, an mRNA encoding an RGN useful in the presently disclosed methods and compositions can include one or more structural and/or chemical modifications or alterations which impart useful properties to the mRNA. For instance, a useful property of an mRNA includes the lack of a substantial induction of the innate immune response of a cell into which the mRNA is introduced. A “structural” feature or modification is one in which two or more linked nucleotides are inserted, deleted, duplicated, inverted or randomized in an mRNA without significant chemical modification to the nucleotides themselves. Because chemical bonds will necessarily be broken and reformed to effect a structural modification, structural modifications are of a chemical nature and hence are chemical modifications. However, structural modifications will result in a different sequence of nucleotides. Chemical modifications to mRNA can involve inclusion of 5-methylcytosine, N1-methyl-pseudouridine, pseudouridine, 2-thiouridine, 4-thiouridine, 5-methoxyuridine, 2′Fluoroguanosine, 2′Fluorouridine, 5-bromouridine, 5-(2-carbomethoxyvinyl) uridine, 5-[3(1-E-propenylamino)] uridine, α-thiocytidine, N6-methyladenosine, 5-methylcytidine, N4-acetylcytidine, 5-formylcytidine, or combinations thereof, in an mRNA. The RGN ribonucleoprotein complex can then be purified from a lysate of the cells.

[0264] Methods for purifying an RGN ribonucleoprotein complex from a lysate of a biological sample are known in the art (e.g., size exclusion and/or affinity chromatography, 2D-PAGE, HPLC, reversed-phase chromatography, immunoprecipitation). In particular methods, the RGN polypeptide comprises a purification tag to aid in its purification, including but not limited to, glutathione-S-transferase (GST), chitin binding protein (CBP), maltose binding protein, thioredoxin (TRX), poly(NANP), tandem affinity purification (TAP) tag, myc, AcV5, AU1, AU5, E, ECS, E2, FLAG, HA, nus, Softag 1, Softag 3, Strep, SBP, Glu-Glu, HSV, KT3, S, S1, T7, V5, VSV-G, 6×His, 10×His, biotin carboxyl carrier protein (BCCP), and calmodulin. Generally, the tagged RGN ribonucleoprotein complex is purified using immobilized metal affinity chromatography. It will be appreciated that other similar methods known in the art may be used, including other forms of chromatography or for example immunoprecipitation, either alone or in combination.

[0265] An “isolated” or “purified” polypeptide, or biologically active portion thereof, or ribonucleoprotein complex, is substantially or essentially free from components that normally accompany or interact with the polypeptide as found in its naturally occurring environment. Thus, an isolated or purified polypeptide or ribonucleoprotein complex is substantially free of other cellular material, or culture medium when produced by recombinant techniques, or substantially free of chemical precursors or other chemicals when chemically synthesized. A protein that is substantially free of cellular material includes preparations of protein having less than about 30%, 20%, 10%, 5%, or 1% (by dry weight) of contaminating protein. When the protein of the invention or biologically active portion thereof is recombinantly produced, optimally culture medium represents less than about 30%, 20%, 10%, 5%, or 1% (by dry weight) of chemical precursors or non-protein-of-interest chemicals. Similarly, an “isolated” polynucleotide or nucleic acid molecule is removed from its naturally occurring environment. An isolated polynucleotide is substantially free of chemical precursors or other chemicals when chemically synthesized or has been removed from a genomic locus via the breaking of phosphodiester bonds. An isolated polynucleotide can be part of a vector, a composition of matter or can be contained within a cell so long as the cell is not the original environment of the polynucleotide.

[0266] Particular methods provided herein for binding and/or cleaving a target sequence of interest involve the use of an in vitro assembled RGN ribonucleoprotein complex. In vitro assembly of an RGN ribonucleoprotein complex can be performed using any method known in the art in which an RGN polypeptide is contacted with a guide RNA under conditions to allow for binding of the RGN polypeptide to the guide RNA. As used herein, “contact”, contacting”, “contacted,” refer to placing the components of a desired reaction together under conditions suitable for carrying out the desired reaction. The RGN polypeptide can be purified from a biological sample, cell lysate, or culture medium, produced via in vitro translation, or chemically synthesized. The guide RNA can be purified from a biological sample, cell lysate, or culture medium, transcribed in vitro, or chemically synthesized. The RGN polypeptide and guide RNA can be brought into contact in solution (e.g., buffered saline solution) to allow for in vitro assembly of the RGN ribonucleoprotein complex.

[0267] A purified or in vitro assembled RGN ribonucleoprotein complex can be introduced into a cell, organelle, or embryo using any method known in the art, including, but not limited to electroporation. Alternatively, an RGN polypeptide and/or polynucleotide encoding or comprising the guide RNA can be introduced into a cell, organelle, or embryo using any method known in the art (e.g., electroporation).

### VII. Methods of Binding, Cleaving, or Modifying a Target Nucleic Acid Molecule

[0268] The present disclosure provides methods for binding, cleaving, and/or modifying a target nucleic acid molecule comprising a target sequence of interest. The methods include introducing into a cell one or more polynucleotides comprising a first expression construct comprising a presently disclosed promoter operably linked to a guide RNA, crRNA, and/or tracrRNA and a second expression construct comprising an RGN-coding sequence. In some embodiments, the method comprises introducing into a cell a polynucleotide comprising an expression construct comprising a presently disclosed promoter operably linked to a guide RNA, wherein the cell comprises an RGN that is capable of binding the introduced guide RNA, thereby directing the RGN to a target sequence. In some embodiments, the method comprises introducing into a cell a polynucleotide comprising an expression construct comprising a presently disclosed promoter operably linked to a crRNA, wherein the cell comprises an RGN and tracrRNA that is capable of binding the introduced crRNA, thereby directing the RGN to a target sequence. The RGN may be a nuclease dead RGN, have nickase activity, or may be a fusion polypeptide. In some embodiments, the fusion polypeptide comprises a base-editing polypeptide, for example a cytosine deaminase or an adenine deaminase. In other embodiments, the RGN fusion protein comprises a reverse transcriptase. In other embodiments, the RGN fusion protein comprises a polypeptide that recruits members of a functional nucleic acid repair complex, such as a member of the nucleotide excision repair (NER) or transcription coupled-nucleotide excision repair (TC-NER) pathway (Wei et al., 2015, PNAS USA 112(27):E3495-504; Troelstra et al., 1992, Cell 71:939-953; Marnef et al., 2017, J Mol Biol 429(9):1277-1288), as described in U.S. Provisional Application No. 63/332,486, which was filed on Apr. 19, 2022, and is incorporated by reference in its entirety. In some embodiments, the RGN fusion protein comprises CSB (van den Boom et al., 2004, J Cell Biol 166(1):27-36; van Gool et al., 1997, EMBO J 16(19):5955-65), which is a member of the TC-NER (nucleotide excision repair) pathway and functions in the recruitment of other members. In further embodiments, the RGN fusion protein comprises an active domain of CSB, such as the acidic domain of CSB.

[0269] In some embodiments, the RGN polypeptide, guide RNA and/or crRNA is heterologous to the cell, organelle, or embryo to which the polynucleotide encoding the RGN polypeptide, guide RNA, crRNA, and/or tracrRNA is introduced.

[0270] In those embodiments wherein the method comprises delivering a polynucleotide encoding a guide RNA, crRNA, tracrRNA, and/or an RGN polypeptide, the cell or embryo can then be cultured under conditions in which the guide RNA, crRNA, and/or RGN polypeptide are expressed. In some embodiments, the method comprises contacting a target sequence with an RGN ribonucleoprotein complex. The RGN ribonucleoprotein complex may comprise an RGN that is nuclease dead or has nickase activity. In some embodiments, the RGN of the ribonucleoprotein complex is a fusion polypeptide comprising a base-editing polypeptide. In some embodiments, the method comprises introducing into a cell, organelle, or embryo comprising a target sequence an RGN ribonucleoprotein complex. The RGN ribonucleoprotein complex can be one that has been purified from a biological sample, recombinantly produced and subsequently purified, or in vitro-assembled as described herein. In those embodiments wherein the RGN ribonucleoprotein complex that is contacted with the target sequence or a cell organelle, or embryo has been assembled in vitro, the method can further comprise the in vitro assembly of the complex prior to contact with the target sequence, cell, organelle, or embryo.

[0271] A purified or in vitro assembled RGN ribonucleoprotein complex can be introduced into a cell, organelle, or embryo using any method known in the art, including, but not limited to electroporation. Alternatively, an RGN polypeptide and/or polynucleotide encoding or comprising the guide RNA can be introduced into a cell, organelle, or embryo using any method known in the art (e.g., electroporation).

[0272] Upon delivery to or contact with the target sequence or cell, organelle, or embryo comprising the target sequence, the guide RNA directs the RGN to bind to the target sequence in a sequence-specific manner. In those embodiments wherein the RGN has nuclease activity, the RGN polypeptide cleaves the target sequence of interest upon binding. The target sequence can subsequently be modified via endogenous repair mechanisms, such as non-homologous end joining, or homology-directed repair with a provided donor polynucleotide.

[0273] Methods to measure binding of an RGN polypeptide to a target sequence are known in the art and include chromatin immunoprecipitation assays, gel mobility shift assays, DNA pull-down assays, reporter assays, microplate capture and detection assays. Likewise, methods to measure cleavage or modification of a target sequence are known in the art and include in vitro or in vivo cleavage assays wherein cleavage is confirmed using PCR, sequencing, or gel electrophoresis, with or without the attachment of an appropriate label (e.g., radioisotope, fluorescent substance) to the target sequence to facilitate detection of degradation products. Alternatively, the nicking triggered exponential amplification reaction (NTEXPAR) assay can be used (see, e.g., Zhang et al. (2016) Chem. Sci. 7:4951-4957). In vivo cleavage can be evaluated using the Surveyor assay (Guschin et al. (2010) Methods Mol Biol 649:247-256).

[0274] In some embodiments, the methods involve the use of a single type of RGN complexed with more than one guide RNA. The more than one guide RNA can target different regions of a single gene or can target multiple genes.

[0275] In those embodiments wherein a donor polynucleotide is not provided, a double-stranded break introduced by an RGN polypeptide can be repaired by a non-homologous end-joining (NHEJ) repair process. Due to the error-prone nature of NHEJ, repair of the double-stranded break can result in a modification to the target sequence. As used herein, a “modification” in reference to a nucleic acid molecule refers to a change in the nucleotide sequence of the nucleic acid molecule, which can be a deletion, insertion, or substitution of one or more nucleotides, or a combination thereof. Modification of the target sequence can result in the expression of an altered protein product or inactivation of a coding sequence.

[0276] In those embodiments wherein a donor polynucleotide is present, the donor sequence in the donor polynucleotide can be integrated into or exchanged with the target nucleotide sequence during the course of repair of the introduced double-stranded break, resulting in the introduction of the exogenous donor sequence. A donor polynucleotide thus comprises a donor sequence that is desired to be introduced into a target sequence of interest. In some embodiments, the donor sequence alters the original target nucleotide sequence such that the newly integrated donor sequence will not be recognized and cleaved by the RGN. Integration of the donor sequence can be enhanced by the inclusion within the donor polynucleotide of flanking sequences, referred to herein as “homology arms” that have substantial sequence identity with the sequences flanking the target sequence, allowing for a homology-directed repair process. In some embodiments, homology arms have a length of at least 50 base pairs, at least 100 base pairs, and up to 2000 base pairs or more, and have at least 90%, at least 95%, or more, sequence homology to their corresponding sequence within the target nucleotide sequence.

[0277] In those embodiments wherein the RGN polypeptide introduces double-stranded staggered breaks, the donor polynucleotide can comprise a donor sequence flanked by compatible overhangs, allowing for direct ligation of the donor sequence to the cleaved target nucleotide sequence comprising overhangs by a non-homologous repair process during repair of the double-stranded break.

[0278] In those embodiments wherein the method involves the use of an RGN that is a nickase (i.e., is only able to cleave a single strand of a double-stranded polynucleotide), the method can comprise introducing two RGN nickases that target identical or overlapping target loci and cleave different strands of the polynucleotide. For example, an RGN nickase that only cleaves the positive (+) strand of a double-stranded polynucleotide can be introduced along with a second RGN nickase that only cleaves the negative (−) strand of a double-stranded polynucleotide.

[0279] In some embodiments, a method is provided for binding a target nucleotide sequence and detecting the target sequence, wherein the method comprises introducing into a cell, organelle, or embryo one or more polynucleotides comprising a first expression construct comprising a presently disclosed promoter operably linked to a coding sequence for a guide RNA, and a second expression construct comprising a coding sequence for an RGN polypeptide, wherein the RGN polypeptide is a nuclease-dead RGN and further comprises a detectable label, and the method further comprises detecting the detectable label. The detectable label may be fused to the RGN as a fusion protein (e.g., fluorescent protein) or may be a small molecule conjugated to or incorporated within the RGN polypeptide that can be detected visually or by other means.

[0280] Also provided herein are methods for modulating the expression of a target gene of interest comprising a target sequence or a gene under the regulation of a target sequence. The methods comprise introducing into a cell, organelle, or embryo one or more polynucleotides comprising a first expression construct comprising a presently disclosed promoter operably linked to a coding sequence for a guide RNA, crRNA, and/or tracrRNA, and a second expression construct comprising a coding sequence for an RGN polypeptide, wherein the RGN polypeptide is a nuclease-dead RGN. In some of these embodiments, the nuclease-dead RGN is a fusion protein comprising an expression modulator domain (i.e., epigenetic modification domain, transcriptional activation domain or a transcriptional repressor domain) as described herein.

[0281] The present disclosure also provides methods for binding and/or modifying a target nucleic acid molecule of interest comprising a target sequence. The methods include introducing into a cell, organelle, or embryo one or more polynucleotides comprising a first expression construct comprising a presently disclosed promoter operably linked to a coding sequence for a guide RNA, crRNA, and/or tracrRNA, and a second expression construct comprising a coding sequence for a fusion polypeptide comprising an RGN and a base-editing polypeptide, for example a cytosine deaminase or an adenine deaminase. In some of these embodiments, the RGN of the fusion polypeptide is a nickase or a nuclease-dead RGN.

[0282] In some embodiments wherein a fusion polypeptide comprising an RGN and a base-editing polypeptide is utilized, the binding of the fusion protein to a target sequence results in the modification of nucleotide(s) adjacent to the target sequence. The nucleobase adjacent to the target sequence that is modified by the deaminase may be 1, 2, 3, 4, 5, 6, 7, 8, 9, 10, 11, 12, 13, 14, 15, 16, 17, 18, 19, 20, 25, 30, 35, 40, 45, 50, 55, 60, 65, 70, 75, 80, 85, 90, 95, or 100 base pairs from the 5′ or 3′ end of the target sequence.

[0283] One of ordinary skill in the art will appreciate that any of the presently disclosed methods can be used to target a single target sequence or multiple target sequences. Thus, methods comprise the use of a single RGN polypeptide in combination with multiple, distinct guide RNAs, which can target multiple, distinct sequences within a single gene and/or multiple genes. Also encompassed herein are methods wherein multiple, distinct guide RNAs are introduced in combination with multiple, distinct RGN polypeptides. These guide RNAs and guide RNA/RGN polypeptide systems can target multiple, distinct sequences within a single gene and/or multiple genes.

[0284] Methods for reducing the expression of a target gene in a cell can also comprise introducing into the cell an expression construct comprising a presently disclosed promoter operably linked to a coding sequence for a gene silencing RNA (e.g., shRNA, siRNA, antisense RNA, or the like), wherein the gene silencing RNA reduces the expression of the target gene.

[0285] In one aspect, the invention provides kits containing any one or more of the elements disclosed in the above methods and compositions. In some embodiments, the kit comprises a vector system and instructions for using the kit. In some embodiments, the vector system comprises (a) an expression construct comprising a presently disclosed promoter operably linked to a coding sequence for a guide RNA, wherein the spacer sequence is absent and one or more insertion sites for inserting a spacer sequence are present; and, in some embodiments, (b) a second expression construct comprising an RGN-coding sequence. Elements may be provided individually or in combinations, and may be provided in any suitable container, such as a vial, a bottle, or a tube.

[0286] In some embodiments, the kit includes instructions in one or more languages. In some embodiments, a kit comprises one or more reagents for use in a process utilizing one or more of the elements described herein. Reagents may be provided in any suitable container. For example, a kit may provide one or more reaction or storage buffers. Reagents may be provided in a form that is usable in a particular assay, or in a form that requires addition of one or more other components before use (e.g. in concentrate or lyophilized form). A buffer can be any buffer, including but not limited to a sodium carbonate buffer, a sodium bicarbonate buffer, a borate buffer, a Tris buffer, a MOPS buffer, a HEPES buffer, and combinations thereof. In some embodiments, the buffer is alkaline. In some embodiments, the buffer has a pH from about 7 to about 10. In some embodiments, the kit comprises a homologous recombination donor template polynucleotide.

### IX. Target Polynucleotides

[0287] In one aspect, the invention provides for methods of modifying a target polynucleotide comprising a target sequence or modifying the expression of a target polynucleotide in a eukaryotic cell, which may be in vivo, ex vivo or in vitro. In some embodiments, the method comprises sampling a cell or population of cells from a human or non-human animal or plant (including microalgae) and modifying the cell or cells. Culturing may occur at any stage ex vivo. The cell or cells may even be re-introduced into the non-human animal or plant (including micro-algae).

[0288] Using natural variability, plant breeders combine most useful genes for desirable qualities, such as yield, quality, uniformity, hardiness, and resistance against pests. These desirable qualities also include growth, day length preferences, temperature requirements, initiation date of floral or reproductive development, fatty acid content, insect resistance, disease resistance, nematode resistance, fungal resistance, herbicide resistance, tolerance to various environmental factors including drought, heat, wet, cold, wind, and adverse soil conditions including high salinity The sources of these useful genes include native or foreign varieties, heirloom varieties, wild plant relatives, and induced mutations, e.g., treating plant material with mutagenic agents. Using the present invention, plant breeders are provided with a new tool to induce mutations. Accordingly, one skilled in the art can analyze the genome for sources of useful genes, and in varieties having desired characteristics or traits employ the present invention to induce the rise of useful genes, with more precision than previous mutagenic agents and hence accelerate and improve plant breeding programs.

[0289] The target polynucleotide of an RGN or gene silencing RNA can be any polynucleotide endogenous or exogenous to the eukaryotic cell. For example, the target polynucleotide can be a polynucleotide residing in the nucleus of the eukaryotic cell. The target polynucleotide can be a sequence coding a gene product (e.g., a protein) or a non-coding sequence (e.g., a regulatory polynucleotide or a junk DNA). Without wishing to be bound by theory, the target strand of the target sequence should be associated with a PAM (protospacer adjacent motif); that is, a short sequence recognized by the RGN. The precise sequence and length requirements for the PAM differ depending on the RGN used, but PAMs are typically 2-7 base pair sequences adjacent to the protospacer (that is, the target strand of the target sequence).

[0290] The target polynucleotide of an RGN or gene silencing RNA may include a number of disease-associated genes and polynucleotides as well as signaling biochemical pathway-associated genes and polynucleotides. Examples of target polynucleotides include a sequence associated with a signaling biochemical pathway, e.g., a signaling biochemical pathway-associated gene or polynucleotide. Examples of target polynucleotides include a disease associated gene or polynucleotide. A “disease-associated” gene or polynucleotide refers to any gene or polynucleotide which is yielding transcription or translation products at an abnormal level or in an abnormal form in cells derived from a disease-affected tissues compared with tissues or cells of a non-disease control. It may be a gene that becomes expressed at an abnormally high level; it may be a gene that becomes expressed at an abnormally low level, where the altered expression correlates with the occurrence and/or progression of the disease. A disease-associated gene also refers to a gene possessing mutation(s) or genetic variation that is directly responsible or is in linkage disequilibrium with a gene(s) that is responsible for the etiology of a disease (e.g., a causal mutation). The transcribed or translated products may be known or unknown, and further may be at a normal or abnormal level. In some embodiments, the disease may be an animal disease. In some embodiments, the disease may be an avian disease. In other embodiments, the disease may be a mammalian disease. In further embodiments, the disease may be a human disease. Examples of disease-associated genes and polynucleotides in humans are available from McKusick-Nathans Institute of Genetic Medicine, Johns Hopkins University (Baltimore, Md.) and National Center for Biotechnology Information, National Library of Medicine (Bethesda, Md.), available on the World Wide Web.

[0291] Although RGNs are particularly useful for their relative ease in targeting to genomic sequences of interest, there still remains an issue of what the RGN can do to address a causal mutation. One approach is to produce a fusion protein between an RGN (e.g., an inactive or nickase variant of the RGN) and a base-editing enzyme or the active domain of a base editing enzyme, such as a cytosine deaminase or an adenine deaminase base editor (U.S. Pat. No. 9,840,699, herein incorporated by reference). In some embodiments, the methods comprise contacting a DNA molecule comprising a target sequence with (a) a fusion protein comprising an RGN of the disclosure or a nickase variant thereof and a base-editing polypeptide such as a deaminase; and (b) a gRNA targeting the fusion protein of (a) to the target sequence; wherein the DNA molecule is contacted with the fusion protein and the gRNA in an amount effective and under conditions suitable for the deamination of a nucleobase. In some embodiments, the target DNA sequence comprises a sequence associated with a disease or disorder, and wherein the deamination of the nucleobase results in a sequence that is not associated with a disease or disorder. In some embodiments, the target DNA sequence resides in an allele of a crop plant, wherein the particular allele of the trait of interest results in a plant of lesser agronomic value. The deamination of the nucleobase results in an allele that improves the trait and increases the agronomic value of the plant.

[0292] In some embodiments, the target DNA sequence comprises a T→C or A→G point mutation associated with a disease or disorder, and wherein the deamination of the mutant C or G base results in a sequence that is not associated with a disease or disorder. In some embodiments, the deamination corrects a point mutation in the sequence associated with the disease or disorder.

[0293] In some embodiments, the sequence associated with the disease or disorder encodes a protein, and wherein the deamination introduces a stop codon into the sequence associated with the disease or disorder, resulting in a truncation of the encoded protein. In some embodiments, the contacting is performed in vivo in a subject susceptible to having, having, or diagnosed with the disease or disorder. In some embodiments, the disease or disorder is a disease associated with a point mutation, or a single-base mutation, in the genome. In some embodiments, the disease is a genetic disease, a cancer, a metabolic disease, or a lysosomal storage disease.

### X. Pharmaceutical Compositions and Methods of Treatment

[0294] Pharmaceutical compositions comprising one or more polynucleotides comprising an expression construct comprising a presently disclosed promoter (i.e., SEQ ID NOs: 1-10 or an active variant or fragment of any thereof) operably linked to a coding sequence, such as one encoding a gene silencing RNA, a guide RNA, a crRNA, or a polypeptide, and a pharmaceutically acceptable carrier are provided. In some of those embodiments wherein the presently disclosed promoter is operably linked to a coding sequence for a guide RNA or a crRNA, the pharmaceutical composition further comprises an RGN-coding sequence, and in some embodiments, a promoter operably linked thereto. In some of these embodiments, the promoter operably linked to the RGN-coding sequence is a presently disclosed promoter.

[0295] A pharmaceutical composition is a composition that is employed to prevent, reduce in intensity, cure or otherwise treat a target condition or disease that comprises an active ingredient (i.e., an expression construct comprising a presently disclosed promoter operably linked to a coding sequence, or cells comprising the expression construct) and a pharmaceutically acceptable carrier.

[0296] As used herein, a “pharmaceutically acceptable carrier” refers to a material that does not cause significant irritation to an organism and does not abrogate the activity and properties of the active ingredient (i.e., an expression construct comprising a presently disclosed promoter operably linked to a coding sequence, or cells comprising the expression construct). Carriers must be of sufficiently high purity and of sufficiently low toxicity to render them suitable for administration to a subject being treated. The carrier can be inert, or it can possess pharmaceutical benefits. In some embodiments, a pharmaceutically acceptable carrier comprises one or more compatible solid or liquid filler, diluents or encapsulating substances which are suitable for administration to a human or other vertebrate animal. In some embodiments, the pharmaceutically acceptable carrier is not naturally-occurring. In some embodiments, the pharmaceutically acceptable carrier and the active ingredient are not found together in nature.

[0297] Pharmaceutical compositions used in the presently disclosed methods can be formulated with suitable carriers, excipients, and other agents that provide suitable transfer, delivery, tolerance, and the like. A multitude of appropriate formulations are known to those skilled in the art. See, e.g., Remington, The Science and Practice of Pharmacy (21st ed. 2005). Suitable formulations include, for example, powders, pastes, ointments, jellies, waxes, oils, lipids, lipid (cationic or anionic) containing vesicles (such as LIPOFECTIN vesicles), liposomes, lipid nanoparticles, DNA conjugates, anhydrous absorption pastes, oil-in-water and water-in-oil emulsions, emulsions carbowax (polyethylene glycols of various molecular weights), semi-solid gels, and semi-solid mixtures containing carbowax. Pharmaceutical compositions for oral or parenteral use may be prepared into dosage forms in a unit dose suited to fit a dose of the active ingredients. Such dosage forms in a unit dose include, for example, tablets, pills, capsules, injections (ampoules), suppositories, etc.

[0298] The disclosure provides for pharmaceutical compositions comprising lipid-based formulations including an active ingredient (i.e. guide RNAs and/or RGNs, or polynucleotides comprising or encoding such). In some embodiments, the lipid-based formulations include liposomes. In some embodiments, the lipid-based formulations include lipid nanoparticles (LNPs). In some embodiments, an active ingredient is encapsulated in the lipid particle and/or disposed on the surface of the lipid particle. In some embodiments, an active ingredient is covalently attached to the lipid particle. In some embodiments, an active ingredient is non-covalently associated with the lipid particle. A covalent attachment includes the sharing of electrons in a chemical bond. Non-covalent interactions include dispersed electromagnetic interactions such as hydrogen bonds, ionic bonds, van der Waals interactions, and hydrophobic bonds.

[0299] In some embodiments, an active ingredient is encapsulated in the lipid particle. The term “encapsulate” means to enclose, surround or encase. As it relates to the formulation of the compounds of the disclosure, encapsulation may be substantial, complete or partial. The term “substantially encapsulated” or “substantial encapsulation” means that greater than 50%, 60%, 70%, 80%, 85%, 90%, 95%, 96%, 97%, 98%, 99%, 99.9%, or greater of the pharmaceutical composition or active ingredient of the disclosure may be enclosed, surrounded, or encased within a delivery agent (e.g., liposome or LNP). The term “partially encapsulated” or “partial encapsulation” means that less than 50%, 40%, 30%, 20%, 10%, or less of the pharmaceutical composition or active ingredient of the disclosure may be enclosed, surrounded, or encased within the delivery agent. Encapsulation may be determined by measuring the escape or the activity of the pharmaceutical composition or active ingredient of the disclosure using fluorescence and/or electron microscopy. For example, at least 1%, 5%, 10%, 20%, 30%, 40%, 50%, 60%, 70%, 80%, 85%, 90%, 95%, 96%, 97%, 98%, 99%, 99.9%, or greater of the pharmaceutical composition or active ingredient of the disclosure is encapsulated in a delivery agent (e.g., liposome or LNP).

[0300] Liposomes are spherical vesicle structures composed of a uni- or multilamellar lipid bilayer surrounding internal aqueous compartments and a relatively impermeable outer lipophilic phospholipid bilayer. Liposomes have gained considerable attention as drug delivery carriers because they are biocompatible, nontoxic, can deliver both hydrophilic and lipophilic drug molecules, protect their cargo from degradation by plasma enzymes, and transport their load across biological membranes and the blood brain barrier (BBB) (see, e.g., Spuch and Navarro (2011) Journal of drug delivery 2011).

[0301] Liposomes can be made from several different types of lipids; however, phospholipids are most commonly used to generate liposomes as drug carriers. Although liposome formation is spontaneous when a lipid film is mixed with an aqueous solution, it can also be expedited by applying force in the form of shaking by using a homogenizer, sonicator, or an extrusion apparatus (see, e.g., Spuch and Navarro (2011) Journal of drug delivery 2011).

[0302] A conventional liposome formulation is mainly comprised of natural phospholipids and phospholipids such as 1,2-distearoryl-sn-glycero-3-phosphatidyl choline (DSPC), sphingomyelin, egg phosphatidylcholines, and monosialoganglioside. In some embodiments, 1,2-dioleoyl-sn-glycero-3-phosphoethanolamine (DOPE) increases stability of a liposome.

[0303] Additives may be added to liposomes in order to modify their structure and properties. In some embodiments, cholesterol and/or sphingomyelin may be added to a liposomal mixture to help stabilize the liposomal structure and to prevent leakage of the liposomal inner cargo. In some embodiments, addition of cholesterol to a conventional liposome formulation reduces rapid release of the encapsulated active ingredient (i.e. guide RNAs and/or RGNs, or polynucleotides comprising or encoding such) into the plasma. In some embodiments, liposomes are prepared from hydrogenated egg phosphatidylcholine or egg phosphatidylcholine, cholesterol, and dicetyl phosphate. In some embodiments, mean liposome vesicle size is adjusted to about 50 or 100 nm.

[0304] In some embodiments, Trojan Horse liposomes (also known as Molecular Trojan Horses or PEGylated immunoliposomes) may be used in pharmaceutical compositions for delivery of an active ingredient across the BBB (described on World Wide Web at cshprotocols.cshlp.org/content/2010/4/pdb.prot5407.long). Without being bound by any theory, it is believed that neutral lipid particles with specific antibodies conjugated to the surface allows crossing of the BBB via endocytosis. In some embodiments, pharmaceutical compositions comprising Trojan Horse liposomes may be used to deliver an active ingredient (i.e. guide RNAs and/or RGNs, or polynucleotides comprising or encoding such) to the brain via an intravascular injection.

[0305] In some embodiments, liposomes include stable nucleic-acid-lipid particles (SNALP) (see, e.g., Morrissey et al. (2005) Nature Biotechnology 23(8):1002-1007; Zimmerman et al. (2006) Nature 441: 111-114). SNALPs include a mixture of cationic and fusogenic lipids and coated with polyethylene glycol (PEG) that allow cellular uptake and endosomal release of an active ingredient cargo. In some embodiments, a SNALP is a class of LNP and includes an ionizable lipid that is cationic at low pH (e.g., DLinDMA), a neutral helper lipid, cholesterol, and a diffusible polyethylene glycol (PEG)-lipid. In some embodiments, a SNALP formulation includes the following lipids: 3-N-(-methoxy poly(ethylene glycol)2000) carbamoyl-1,2-dimyrestyloxy-propylamine (PEG-cDMA); 1,2-dilinoleyloxy-N,N-dimethyl-3-aminopropane (DLinDMA); 1,2-distearoyl-sn-glycero-3-phosphocholine (DSPC); and cholesterol. In some embodiments, a SNALP includes synthetic cholesterol, dipalmitoylphosphatidylcholine (DOPC), PEG-cDMA, and DLinDMA (see, e.g., Geisbert et al. (2010) Lancet 375:1896-1905). In some embodiments, a SNALP includes synthetic cholesterol, DSPC, PEG-cDMA, and DLinDMA (see, e.g., Judge et al. (2009) J. Clin. Invest. 119:661-673). In some embodiments, SNALP liposomes are about 80-100 nm in size. SNALPs have been used as effective delivery molecules to highly vascularized HepG2-derived liver tumors (see, e.g., Li et al. (2012) Gene Therapy 19:775-780).

[0306] Without being bound by any one theory, during formulation of SNALPs, the ionizable lipid serves to condense lipid with an active ingredient (e.g., a nucleic acid molecule) during particle formation. When positively charged under increasingly acidic endosomal conditions, the ionizable lipid may mediate the fusion of a SNALP with the endosomal membrane, enabling release of the active ingredient into the cytoplasm. The PEG-lipid may stabilize the particle and reduce aggregation during formulation, and subsequently may provide a neutral hydrophilic exterior that improves pharmacokinetic properties. In some embodiments, SNALP liposomes are prepared by formulating DLinDMA and PEG-cDMA with DSPC, cholesterol and an active ingredient using a 25:1 lipid: active ingredient ratio and a 48:40:10:2 molar ratio of cholesterol:DLinDMA:DSPC:PEG-cDMA.

[0307] In some embodiments, a pharmaceutical composition of the disclosure includes LNPs. In some embodiments, lipids may be formulated with an active ingredient of the present disclosure to form LNPs. An LNP comprises a plurality of lipid molecules physically associated with each other by intermolecular forces. In some embodiments, LNPs include liposomes. In some embodiments, LNPs differ from liposomes in not having a continuous lipid bilayer. In some embodiments, LNPs comprise solid particles having a mixture of solid and liquid lipids. In some embodiments, LNPs include dendrimer lipid nanoparticles (DLNPs), SNALPs, and lipid-like nanoparticles (LLNPs). In general, a “nanoparticle” refers to any particle having a diameter of less than 1000 nanometers (nm). In some embodiments, nanoparticles have a diameter of 500 nm or less. In some embodiments, nanoparticles have a diameter ranging between 25 nm and 200 nm, or 100 nm or less. In some embodiments, nanoparticles have a diameter ranging between 35 nm and 60 nm. In some embodiments, an LNP includes a lipid particle between about 1 and about 100 nm in size.

[0308] LNPs include four components: ionizable cationic lipids, fusogenic zwitterionic phospholipids, cholesterol, and PEGylated (PEG) lipids. In some embodiments, the ionizable cationic lipid component complexes a negatively charged polynucleotide and enhances endosomal escape). In some embodiments, the phospholipid component functions in modifying lipid bilayer structure. In some embodiments, the cholesterol component helps to stabilize an LNP. In some embodiments, the PEG lipid component decreases LNP aggregation and non-specific uptake.

[0309] Ionizable cationic lipids useful in LNPs include: 1,2-dilineoyl-3-dimethylammonium-propane (DLinDAP); DLinDMA; 1,2-dilinoleyloxy-keto-N,N-dimethyl-3-aminopropane (DLinK-DMA); 1,2-dilinoleyl-4-(2-dimethylaminoethyl)-[1,3]-dioxolane (DLinKC2-DMA); 5A2-SC8 (Zhou et al. (2016) Proc. Natl Acad. Sci. USA 113:520-525); C12-200 (Love et al. (2010) Proc. Natl Acad. Sci. USA 107:1864-1869); 246C10 (Kim et al. (2021) Sci Adv 7(9): eabf4398); cKK-E12 (Fenton et al. (2016) Advanced Materials 28(15):2939-2943); 1,2-distearyloxy-N,N-dimethyl-3-aminopropane (DSDMA); 1,2-dioleyloxy-N,N-dimethyl-3-aminopropane (DODMA); 1,2-dilinolenyloxy-N,N-dimethyl-3-aminopropane (DLenDMA); and dilinoleylmethyl-4-dimethylaminobutyrate (Dlin-MC3-DMA; Jayaraman et al. (2012) Angew Chem Int Ed Engl. 51(34): 8529-8533). Cationic lipids are further described in International Publication Nos. WO2012040184, WO2011153120, WO2011149733, WO2011090965, WO2011043913, WO2011022460, WO2012061259, WO2012054365, WO2012044638, WO2010080724, WO201021865 and WO2008103276, U.S. Pat. Nos. 7,893,302 and 7,404,969 and US Patent Publication No. US20100036115, each of which is herein incorporated by reference in their entirety.

[0310] Zwitterionic phospholipids useful for LNPs include DSPC, DOPE, and DOPC.

[0311] PEG lipids useful for LNPs include: 1,2-dimyristoyl-rac-glycero-3-methoxypolyethylene glycol (PEG-DMG); (3-o-[2″-(methoxypolyethyleneglycol 2000) succinoyl]-1,2-dimyristoyl-sn-glycol (PEG-S-DMG); R-3-[(ω-methoxy-poly(ethylene glycol)2000) carbamoyl]-1,2-dimyristyloxlpropyl-3-amine (PEG-C-DOMG); and C16 PEG-ceramide. In some embodiments, an LNP includes 50:10:38.5:1.5 molar ratio of DLinKC2-DMA or C12-200:DSPC:cholesterol:PEG-DMG (see, e.g., Basha et al. (2011) Molecular Therapy 19(12):2186-2200). In some embodiments, an LNP includes 26.5:20:52:1.5 ionizable lipid:DOPE:cholesterol:PEG lipid (see, e.g., Han et al. (2022) Sci Adv 8(3): eabj6901; Kim et al. (2021) Sci Adv 7(9): eabf4398). PEG lipids are further described in WO2012099755. In some embodiments, the ratio of PEG in the LNP formulations may be increased or decreased and/or the carbon chain length of the PEG lipid may be modified from C14 to C18 to alter the pharmacokinetics and/or biodistribution of the LNP formulations.

[0312] In some embodiments, the charge of an LNP is taken into consideration. Cationic lipids may combine with negatively charged lipids to induce non-bilayer structures that facilitate intracellular delivery. Because charged LNPs are rapidly cleared from circulation following intravenous injection, ionizable cationic lipids with pKa values below 7 were developed (see, e.g., Basha et al. (2011) Molecular Therapy 19(12):2186-2200). Negatively charged polymers such as polynucleotides may be loaded into LNPs at low pH values (e.g., pH 4) where the ionizable lipids display a positive charge. However, at physiological pH values, the LNPs exhibit a low surface charge compatible with longer circulation times.

[0313] Preparation of LNPs and encapsulation of an active ingredient are described in e.g., Basha et al. (2011) Molecular Therapy 19(12):1286-2200; Han et al. (2022) Sci Adv 8(3): eabj6901; Kim et al. (2021) Sci Adv 7(9): eabf4398; Finn et al. (2018) Cell Reports 22:2227-2235; Wei et al. (2020) Nature Communications 11:3232; WO2011127255; and WO2008103276. Lipids are commercially available (e.g., from Tekmira Pharmaceuticals, Vancouver, Canada; Avanti Polar Lipids, Inc., Alabaster, AL) or may be synthesized (e.g., Kim et al. (2021) Sci Adv 7(9): eabf4398). Synthesis of cationic lipids are also described in International Publication Nos. WO2012040184, WO2011153120, WO2011149733, WO2011090965, WO2011043913, WO2011022460, WO2012061259, WO2012054365, WO2012044638, WO2010080724 and WO201021865. Cholesterol is commercially available (e.g., from Sigma-Aldrich, St Louis, MO).

[0314] In some embodiments, encapsulation may be performed by dissolving lipid mixtures comprising cationic lipid (e.g., Dlin-DMA):phospholipid (e.g., DSPC, DOPE):cholesterol:PEG-lipid (e.g., at 40:10:40:10 molar ratio) in ethanol. An active ingredient (e.g., a polynucleotide comprising or encoding a guide RNA or RGN of the disclosure) may be dissolved in an acidic buffer (e.g., citrate, acetate), pH 3 or 4. In some embodiments, the lipid solution and active ingredient solution may be mixed using a microfluidics system (Chen et al. (2012) J. Amer. Chem. Soc. 134:6948-6951; e.g., NanoAssemblr from Precision Nanosystems) or by dropwise addition of the lipid solution to the active ingredient solution. Removal of ethanol and neutralization of formulation buffer may be performed by dialysis for, e.g., 16 hours or overnight, against phosphate-buffered saline (PBS) using dialysis cassettes (e.g., 3500 molecular weight cut-off cassettes from Life Technologies). Dynamic light scattering may be used to assess LNP size, polydispersity index (PDI), and zeta potential. Encapsulation efficiency of an active ingredient such as RNA may be determined by assays such as Quant-It™ Ribogreen Assay (Thermo Fisher). In some embodiments wherein the encapsulated active ingredient is a polynucleotide, the polynucleotide may be extracted from the eluted nanoparticles and quantified at 260 nm. LNP pKa may be assessed using a 2-(p-toluidino)-6-napthalene sulfonic acid (TNS) assay (Zhang et al. (2011) Langmuir 27(5):1907-1914). In some embodiments, a final lipid: active ingredient weight ratio includes 12:1, 11:1, 10:1, 9:1, 8:1, 7:1, 6:1, and 5:1.

[0315] In some embodiments where a pharmaceutical composition comprises a ribonucleoprotein (RNP) complex (i.e. RGN and guide RNA) encapsulated in an LNP, inclusion of an additional permanent cationic lipid (e.g., 1,2-dioleoyl-3-trimethylammonium-propane (DOTAP)) allows formation of LNPs comprising RNP by mixing an ethanol solution of lipids with a solution of RNP at physiological pH (e.g., PBS buffer; Wei et al. (2020) Nature Communications 11:3232). In some embodiments, the permanent cationic lipid is included at 10 to 20 mole % of total lipids in LNPs.

[0316] In some embodiments, the LNP formulations described herein may additionally comprise a permeability enhancer molecule. Non-limiting permeability enhancer molecules are described in US2005/0222064.

[0317] In some embodiments, the LNP compositions are biodegradable, in that they do not accumulate to cytotoxic levels in vivo at a therapeutically effective dose. LNP formulations may be improved by replacing the cationic lipid with a biodegradable cationic lipid which is known as a rapidly eliminated lipid nanoparticle (reLNP). In some embodiments, the rapid metabolism of the rapidly eliminated lipids can improve the tolerability and therapeutic index of LNPs by an order of magnitude from a 1 mg/kg dose to a 10 mg/kg dose in rat. Inclusion of an enzymatically degraded ester linkage can improve the degradation and metabolism profile of the cationic component, while still maintaining the activity of the reLNP formulation. The ester linkage can be internally located within the lipid chain or it may be terminally located at the terminal end of the lipid chain. The internal ester linkage may replace any carbon in the lipid chain.

[0318] In some embodiments, the LNP compositions do not cause an innate immune response that leads to substantial adverse effects at a therapeutic dose level. In some embodiments, the LNP compositions provided herein do not cause toxicity at a therapeutic dose level.

[0319] In some embodiments, the active ingredient (i.e. guide RNAs and/or RGNs, or polynucleotides comprising or encoding such) is formulated as a solid lipid nanoparticle. A solid lipid nanoparticle (SLN) may be spherical with an average diameter between 10 to 1000 nm. SLN possess a solid lipid core matrix that can solubilize lipophilic molecules and may be stabilized with surfactants and/or emulsifiers. In a further embodiment, the lipid nanoparticle may be a self-assembly lipid-polymer nanoparticle (see, e.g., Zhang et al. (2008) ACS Nano 2(8):1696-1702).

[0320] In some embodiments, a lipid-based formulation including an active ingredient (i.e. guide RNAs and/or RGNs, or polynucleotides comprising or encoding such) can be formulated for controlled release and/or targeted delivery. As used herein, “controlled release” refers to a pharmaceutical composition or compound release profile that conforms to a particular pattern of release to effect a therapeutic outcome.

[0321] In some embodiments, a lipid-based formulation including an active ingredient (i.e. guide RNAs and/or RGNs, or polynucleotides comprising or encoding such) includes at least one controlled release coating. Controlled release coatings include: OPADRY® (Colorcon Inc., Harleysville, PA); polyvinylpyrrolidone/vinyl acetate copolymer; polyvinylpyrrolidone; hydroxypropyl methylcellulose; hydroxypropyl cellulose; hydroxyethyl cellulose; EUDRAGIT RL® (Evonik, Essen, Germany); EUDRAGIT RS® (Evonik, Essen, Germany); and cellulose derivatives such as ethylcellulose aqueous dispersions (AQUACOAT® and SURELEASE®, Colorcon Inc., Harleysville, PA). In some embodiments, the controlled release and/or targeted delivery formulation may comprise at least one degradable polyester which may contain polycationic side chains. Degradable polyesters include poly(serine ester), poly(L-lactide-co-L-lysine), poly(4-hydroxy-L-proline ester), and combinations thereof. In some embodiments, the degradable polyesters may include a PEG conjugation to form a PEGylated polymer.

[0322] In some embodiments, LNP formulations may be prepared such that they passively or actively are directed to different cell types in vivo, including hepatocytes, immune cells, tumor cells, endothelial cells, antigen presenting cells, and leukocytes (Akinc et al. (2010) Mol Ther. 18: 1357-1364; Song et al. (2005) Nat Biotechnol. 23:709-717; Judge et al. (2009) J Clin Invest. 119:661-673; Kaufmann et al. (2010) Microvasc Res 80:286-293; Santel et al. (2006) Gene Ther 13:1222-1234; Santel et al. (2006) Gene Ther 13:1360-1370; Gutbier et al. (2010) Pulm Pharmacol. Ther. 23:334-344; Basha et al. (2011) Mol. Ther. 19:2186-2200; Fenske and Cullis (2008) Expert Opin Drug Deliv. 5:25-44; Peer et al. (2008) Science 319:627-630; Peer and Lieberman (2011) Gene Ther. 18:1127-1133; all of which are incorporated herein by reference in their entirety). One example of passive targeting of formulations to liver cells includes the DLin-DMA, DLin-KC2-DMA and MC3-based lipid nanoparticle formulations which have been shown to bind to apolipoprotein E and promote binding and uptake of these formulations into hepatocytes in vivo (Akinc et al. (2010) Mol Ther. 18: 1357-1364).

[0323] LNP formulations can also be selectively targeted through expression of different ligands on their surface such as folate, transferrin, N-acetylgalactosamine (GalNAc), and antibody targeted approaches (Kolhatkar et al. (2011) Curr Drug Discov Technol. 8:197-206; Musacchio and Torchilin (2011) Front Biosci. 16:1388-1412; Yu et al. (2010) Mol Membr Biol. 27:286-298; Patil et al. (2008) Crit Rev Ther Drug Carrier Syst. 25:1-61; Benoit et al. (2011) Biomacromolecules. 12:2708-2714; Zhao et al. (2008) Expert Opin Drug Deliv. 5:309-319; Akinc et al. (2010) Mol Ther. 18: 1357-1364; Srinivasan et al. (2012) Methods Mol Biol. 820:105-116; Ben-Arie et al. (2012) Methods Mol Biol. 757:497-507; Peer, D (2010) J of controlled release 148(1):63-68; Peer et al. (2007) Proc Natl Acad Sci USA. 104:4095-4100; Kim et al. (2011) Methods Mol Biol. 721:339-353; Subramanya et al. (2010) Mol Ther. 18:2028-2037; Song et al. (2005) Nat Biotechnol. 23:709-717; Peer et al. (2008) Science 319:627-630; Peer and Lieberman (2011) Gene Ther. 18:1127-1133; all of which are incorporated herein by reference in their entirety).

[0324] In some embodiments, an active ingredient (i.e. guide RNAs and/or RGNs, or polynucleotides comprising or encoding such) may be encapsulated into an LNP and the LNP may then be encapsulated into a polymer, polymer matrix, hydrogel and/or surgical sealant described herein and/or known in the art. In some embodiments, the polymer, hydrogel or surgical sealant includes: poly(lactic-co-glycolic acid (PLGA); ethylene vinyl acetate (EVAc); poloxamer; GELSITE® (Nanotherapeutics, Inc. Alachua, FL); HYLENEX® (Halozyme Therapeutics, San Diego CA); surgical sealants such as fibrinogen polymers (Ethicon Inc., Cornelia, GA) and TISSELL® (Baxter International, Inc Deerfield, IL); PEG-based sealants; and COSEAL® (Baxter International, Inc Deerfield, IL).

[0325] LNPs and LNP formulations are further described in, e.g., U.S. Pat. Nos. 7,982,027; 7,799,565; 8,058,069; 8,283,333; 7,901,708; 7,745,651; 7,803,397; 8,101,741; 8,188,263; 7,915,399; 8,236,943 and 7,838,658; European Pat. Nos. 1766035; 1519714; 1781593; and 1664316.

[0326] In some embodiments wherein cells comprising or modified with the presently disclosed expression constructs (e.g., encoding gene silencing RNAs, RGN, gRNAs, RGN systems) are administered to a subject, the cells are administered as a suspension with a pharmaceutically acceptable carrier. One of skill in the art will recognize that a pharmaceutically acceptable carrier to be used in a cell composition will not include buffers, compounds, cryopreservation agents, preservatives, or other agents in amounts that substantially interfere with the viability of the cells to be delivered to the subject. A formulation comprising cells can include e.g., osmotic buffers that permit cell membrane integrity to be maintained, and optionally, nutrients to maintain cell viability or enhance engraftment upon administration. Such formulations and suspensions are known to those of skill in the art and/or can be adapted for use with the cells described herein using routine experimentation.

[0327] A cell composition can also be emulsified or presented as a liposome composition, provided that the emulsification procedure does not adversely affect cell viability. The cells and any other active ingredient can be mixed with excipients that are pharmaceutically acceptable and compatible with the active ingredient, and in amounts suitable for use in the therapeutic methods described herein.

[0328] Additional agents included in a cell composition can include pharmaceutically acceptable salts of the components therein. Pharmaceutically acceptable salts include the acid addition salts (formed with the free amino groups of the polypeptide) that are formed with inorganic acids, such as, for example, hydrochloric or phosphoric acids, or such organic acids as acetic, tartaric, mandelic and the like. Salts formed with the free carboxyl groups can also be derived from inorganic bases, such as, for example, sodium, potassium, ammonium, calcium or ferric hydroxides, and such organic bases as isopropylamine, trimethylamine, 2-ethylamino ethanol, histidine, procaine and the like.

[0329] Physiologically tolerable and pharmaceutically acceptable carriers are well known in the art. Exemplary liquid carriers are sterile aqueous solutions that contain no materials in addition to the active ingredients and water, or contain a buffer such as sodium phosphate at physiological pH value, physiological saline or both, such as phosphate-buffered saline. Still further, aqueous carriers can contain more than one buffer salt, as well as salts such as sodium and potassium chlorides, dextrose, polyethylene glycol and other solutes. Liquid compositions can also contain liquid phases in addition to and to the exclusion of water. Exemplary of such additional liquid phases are glycerin, vegetable oils such as cottonseed oil, and water-oil emulsions. The amount of an active compound used in the cell compositions that is effective in the treatment of a particular disorder or condition can depend on the nature of the disorder or condition, and can be determined by standard clinical techniques.

[0330] The presently disclosed expression constructs can be formulated with pharmaceutically acceptable excipients such as carriers, solvents, stabilizers, adjuvants, diluents, etc., depending upon the particular mode of administration and dosage form. In some embodiments, these pharmaceutical compositions are formulated to achieve a physiologically compatible pH, and range from a pH of about 3 to a pH of about 11, about pH 3 to about pH 7, depending on the formulation and route of administration. In some embodiments, the pH can be adjusted to a range from about pH 5.0 to about pH 8. In some embodiments, the compositions can comprise a therapeutically effective amount of at least one compound as described herein, together with one or more pharmaceutically acceptable excipients. In some embodiments, the compositions comprise a combination of the compounds described herein, or include a second active ingredient useful in the treatment or prevention of bacterial growth (for example and without limitation, anti-bacterial or anti-microbial agents), or include a combination of reagents of the present disclosure.

[0331] Suitable excipients include, for example, carrier molecules that include large, slowly metabolized macromolecules such as proteins, polysaccharides, polylactic acids, polyglycolic acids, polymeric amino acids, amino acid copolymers, and inactive virus particles. Other exemplary excipients can include antioxidants (for example and without limitation, ascorbic acid), chelating agents (for example and without limitation, EDTA), carbohydrates (for example and without limitation, dextrin, hydroxyalkylcellulose, and hydroxyalkylmethylcellulose), stearic acid, liquids (for example and without limitation, oils, water, saline, glycerol and ethanol), wetting or emulsifying agents, pH buffering substances, and the like.

[0332] In some embodiments, the formulations are provided in unit-dose or multi-dose containers, for example sealed ampules and vials, and may be stored in a freeze-dried (lyophilized) condition requiring the addition of the sterile liquid carrier, for example, saline, water-for-injection, a semi-liquid foam, or gel, immediately prior to use. Extemporaneous injection solutions and suspensions may be prepared from sterile powders, granules and tablets of the kind previously described. In some embodiments, the active ingredient is dissolved in a buffered liquid solution that is frozen in a unit-dose or multi-dose container and later thawed for injection or kept/stabilized under refrigeration until use.

[0333] The therapeutic agent(s) may be contained in controlled release systems. In order to prolong the effect of a drug, it often is desirable to slow the absorption of the drug from subcutaneous, intrathecal, or intramuscular injection. This may be accomplished by the use of a liquid suspension of crystalline or amorphous material with poor water solubility. The rate of absorption of the drug then depends upon its rate of dissolution which, in turn, may depend upon crystal size and crystalline form. Alternatively, delayed absorption of a parenterally administered drug form is accomplished by dissolving or suspending the drug in an oil vehicle. In some embodiments, the use of a long-term sustained release implant may be particularly suitable for treatment of chronic conditions. Long-term sustained release implants are well-known to those of ordinary skill in the art.

[0334] Methods of treating a disease in a subject in need thereof are provided herein. The methods comprise administering to a subject in need thereof an effective amount of a presently disclosed polynucleotide(s) comprising an expression construct comprising a presently disclosed promoter (i.e., SEQ ID NOs: 1-10 or an active variant or fragment of any thereof) operably linked to a coding sequence (e.g., coding sequence for a gene silencing RNA, a guide RNA or a crRNA, a polypeptide such as an RGN), or a cell modified by or comprising any one of these compositions.

[0335] In some embodiments, the treatment comprises in vivo gene editing by administering one or more polynucleotides comprising an expression construct comprising a presently disclosed promoter operably linked to a guide RNA or a crRNA, and in some embodiments, a second expression construct comprising an RGN-coding sequence and/or a tracrRNA-coding sequence. In some embodiments, the treatment comprises ex vivo gene editing wherein cells are genetically modified ex vivo with an RGN and then the modified cells are administered to a subject. In some embodiments, the genetically modified cells originate from the subject that is then administered the modified cells, and the transplanted cells are referred to herein as autologous. In some embodiments, the genetically modified cells originate from a different subject (i.e., donor) within the same species as the subject that is administered the modified cells (i.e., recipient), and the transplanted cells are referred to herein as allogeneic. In some examples described herein, the cells can be expanded in culture prior to administration to a subject in need thereof.

[0336] In some embodiments, the disease to be treated with the presently disclosed compositions is one that can be treated with immunotherapy, such as with a chimeric antigen receptor (CAR) T cell. Such diseases include but are not limited to cancer.

[0337] In some embodiments, the disease to be treated with the presently disclosed compositions is associated with a causal mutation. As used herein, a “causal mutation” refers to a particular nucleotide, nucleotides, or nucleotide sequence in the genome that contributes to the severity or presence of a disease or disorder in a subject. The correction of the causal mutation leads to the improvement of at least one symptom resulting from a disease or disorder. In some embodiments, the causal mutation is adjacent to a PAM site recognized by an RGN. The causal mutation can be corrected with an RGN or a fusion polypeptide comprising an RGN and a base-editing polypeptide (i.e., a base editor). Non-limiting examples of diseases associated with a causal mutation include cystic fibrosis, Hurler syndrome, Friedreich's Ataxia, Huntington's Disease, and sickle cell disease. Additional non-limiting examples of disease-associated genes and mutations are available from McKusick-Nathans Institute of Genetic Medicine, Johns Hopkins University (Baltimore, Md.) and National Center for Biotechnology Information, National Library of Medicine (Bethesda, Md.), available on the World Wide Web.

[0338] In some embodiments, the disease to be treated with the presently disclosed compositions, such as those comprising a coding sequence for a gene silencing RNA, is a disease associated with the overexpression of a particular gene. In some of these embodiments, the gene silencing RNA targets the overexpressed gene.

[0339] In some embodiments, a method of treating a disease in a subject in need thereof comprises creating an induced pluripotent stem cell (iPSC) or isolating a mesenchymal stem cell from the subject, contacting the iPSC or mesenchymal stem cell with an RGN polypeptide complexed or with a pharmaceutical composition disclosed herein in order to genetically modify a target sequence within the cell, differentiating the modified iPSC or the modified mesenchymal stem cell into a genetically-modified mature cell or precursor thereof, and administering the genetically-modified mature cell or precursor thereof into the subject. In some embodiments, the iPSC or the mesenchymal stem cell is an autologous or an allogeneic cell. In some embodiments, the iPSC or the mesenchymal stem cell is derived from a donor that is a perfect human leukocyte antigen (HLA) match for the subject. In some embodiments, the subject is administered a myeloablative therapy prior to administration of the modified cells.

[0340] Any method known in the art for creating patient specific iPS cells can be used, including but not limited to that described in Takahashi and Yamanaka, Cell 126(4):663-76, 2006. For example, the creating step can comprise: a) isolating a somatic cell, such as a skin cell or fibroblast, from the subject; and b) introducing a set of pluripotency-associated genes into the somatic cell in order to induce the cell to become a pluripotent stem cell. The set of pluripotency-associated genes can be one or more of the genes selected from the group consisting of OCT4, SOX1, SOX2, SOX3, SOX15, SOX18, NANOG, KLF1, KLF2, KLF4, KLF5, c-MYC, n-MYC, REM2, TERT and LIN28. Mesenchymal stem cells can be isolated according to any method known in the art, such as from a patient's bone marrow or peripheral blood. For example, marrow aspirate can be collected into a syringe with heparin. Cells can be washed and centrifuged on a Percoll. The cells can be cultured in Dulbecco's modified Eagle's medium (DMEM) (low glucose) containing 10% fetal bovine serum (FBS) (Pittinger M F, Mackay A M, Beck S C et al., Science 1999; 284:143-147).

[0341] Genetically modified cells of the disclosure administered to a subject include autologous and allogeneic cells. Allogeneic cells refer to cells that are from a donor or donors (i.e. an individual or individuals from which the genetically modified cells are derived). Autologous cells refer to cells that are from the subject undergoing treatment (i.e. the recipient of the genetically modified cells). Due to the risk of transplant rejection, an effort is made to optimize the degree of major histocompatibility complex (MHC)/human leukocyte antigen (HLA) matching between donor tissue and recipient. HLA are found on the surface of cells and help the body in identifying self versus non-self, so that the body can attack foreign entities such as bacteria and viruses. HLA typing of donor tissue and the recipient concerns determining the genotype of six HLA antigens or alleles between a donor(s) and recipient to assess the degree to which the six HLA match. HLA alleles usually refer to two each at the loci HLA-A, HLA-B and HLA-DR, or one each at the loci HLA-A, HLA-B and HLA-C and one each at the loci HAL-DRB1, HLA-DQB1 and HLA-DPB1 (see e.g., Kawase et al., 2007, Blood 110:2235-2241). In some embodiments, 4 of 6 HLA matching between donor(s) and recipient are sufficient for administration to the recipient of cells derived from a donor. In some embodiments, 5 of 6 HLA matching between donor(s) and recipient are sufficient for administration to the recipient of cells derived from a donor(s). In some embodiments, 6 of 6 HLA are matched between donor(s) and recipient for administration to the recipient of cells derived from the donor(s). In general, a 4/6, 5/6, or a 6/6 HLA match is the standard of clinical care. When all 6 HLA match between donor(s) and recipient, the match is referred to as being a perfect match.

[0342] As used herein, “treatment” or “treating,” or “palliating” or “ameliorating” are used interchangeably. These terms refer to an approach for obtaining beneficial or desired results including but not limited to a therapeutic benefit and/or a prophylactic benefit. By therapeutic benefit is meant any therapeutically relevant improvement in or effect on one or more diseases, conditions, or symptoms under treatment. For prophylactic benefit, the compositions may be administered to a subject at risk of developing a particular disease, condition, or symptom, or to a subject reporting one or more of the physiological symptoms of a disease, even though the disease, condition, or symptom may not have yet been manifested. In some embodiments, treatment may be administered after one or more symptoms have developed and/or after a disease has been diagnosed. In some embodiments, treatment may be administered in the absence of symptoms, e.g., to prevent or delay onset of a symptom or inhibit onset or progression of a disease. For example, treatment may be administered to a susceptible individual prior to the onset of symptoms (e.g., in light of a history of symptoms and/or in light of genetic or other susceptibility factors). Treatment may also be continued after symptoms have resolved, for example, to prevent or delay their prevention or recurrence.

[0343] The term “effective amount” or “therapeutically effective amount” refers to the amount of an agent that is sufficient to effect beneficial or desired results. The therapeutically effective amount may vary depending upon one or more of: the subject and disease condition being treated, the weight and age of the subject, the severity of the disease condition, the manner of administration and the like, which can readily be determined by one of ordinary skill in the art. The specific dose may vary depending on one or more of: the particular agent chosen, the dosing regimen to be followed, whether it is administered in combination with other compounds, timing of administration, and the delivery system in which it is carried.

[0344] The term “administering” refers to the placement of an active ingredient into a subject, by a method or route that results in at least partial localization of the introduced active ingredient at a desired site, such as a site of injury or repair, such that a desired effect(s) is produced. In some embodiments, the disclosure provides methods comprising delivering any of the nucleic acid molecules, expression constructs, RGN polypeptides, ribonucleoprotein complexes, vectors, and/or pharmaceutical compositions described herein. In some embodiments, the delivering comprises electroporation. In some embodiments, the disclosure further provides cells produced by such methods, and organisms (such as animals or plants) comprising or produced from such cells. In some embodiments, a RGN polypeptide and/or nucleic acid molecules as described herein in combination with (and optionally complexed with) a guide sequence is delivered to a cell.

[0345] In those embodiments wherein cells are administered, the cells can be administered by any appropriate route that results in delivery to a desired location in the subject where at least a portion of the implanted cells or components of the cells remain viable. The period of viability of the cells after administration to a subject can be as short as a few hours, e.g., twenty-four hours, to a few days, to as long as several years, or even the life time of the patient, i.e., long-term engraftment. For example, in some aspects described herein, an effective amount of photoreceptor cells or retinal progenitor cells is administered via a systemic route of administration, such as an intraperitoneal or intravenous route.

[0346] In some embodiments, the administering comprises administering by viral delivery. In some embodiments, the administering comprises administering by electroporation. In some embodiments, the administering comprises administering by nanoparticle delivery. In some embodiments, the administering comprises administering by liposome delivery. In some embodiments, administration of a pharmaceutical composition of the disclosure includes daily intravenous injections of about 1, 2, 3, 4, 5, 6, 7, 8, 9, 10 mg/kg/day, or more of an active ingredient in a pharmaceutical composition comprising a liposome or LNP. In some embodiments, administration of a pharmaceutical composition comprising a liposome or LNP includes doses of about 0.01 to 1 mg per kg of body weight. In some embodiments, administration of a pharmaceutical composition comprising a liposome or LNP includes doses of about 1 to 10 mg per kg of body weight.

[0347] Suitable routes of administering the pharmaceutical compositions described herein include, without limitation: topical, subcutaneous, transdermal, intradermal, intralesional, intraarticular, intraperitoneal, intravesical, transmucosal, gingival, intradental, intracochlear, transtympanic, intraorgan, epidural, intrathecal, intramuscular, intravenous, intravascular, intraosseus, periocular, intratumoral, intracerebral, and intracerebroventricular administration.

[0348] In embodiments, the pharmaceutical composition described herein is administered to a subject by injection, inhalation (e.g., of an aerosol), by means of a catheter, by means of a suppository, or by means of an implant, the implant being of a porous, non-porous, or gelatinous material, including a membrane, such as a sialastic membrane, or a fiber. In embodiments, the pharmaceutical composition is formulated for delivery to a subject, e.g., for gene editing.

[0349] In embodiments, the pharmaceutical composition is formulated in accordance with routine procedures as a composition adapted for intravenous or subcutaneous administration to a subject, e.g., a human. In embodiments, pharmaceutical composition for administration by injection are solutions in sterile isotonic aqueous buffer. Where necessary, the pharmaceutical can also include a solubilizing agent and a local anesthetic such as lignocaine to ease pain at the site of the injection. Generally, the ingredients are supplied either separately or mixed together, for example, as a dry lyophilized powder or water free concentrate in a hermetically sealed container such as an ampoule or sachette indicating the quantity of active agent. Where the pharmaceutical is to be administered by infusion, it can be dispensed with an infusion bottle containing sterile pharmaceutical grade water or saline. Where the pharmaceutical composition is administered by injection, an ampoule of sterile water for injection or saline can be provided so that the ingredients can be mixed prior to administration.

[0350] In embodiments, the pharmaceutical composition can be contained within a lipid particle or vesicle, such as a liposome or microcrystal, which is also suitable for parenteral administration.

[0351] Although the descriptions of pharmaceutical compositions provided herein are principally directed to pharmaceutical compositions which are suitable for administration to humans, it will be understood by the skilled artisan that such compositions are generally suitable for administration to animals or organisms of all sorts.

[0352] As used herein, the term “subject” refers to any individual for whom diagnosis, treatment or therapy is desired. In some embodiments, the subject is an animal. In some embodiments, the subject is a mammal. In some embodiments, the subject is a human being.

[0353] The efficacy of a treatment can be determined by the skilled clinician. However, a treatment is considered an “effective treatment,” if any one or all of the signs or symptoms of a disease or disorder are altered in a beneficial manner (e.g., decreased by at least 10%), or other clinically accepted symptoms or markers of disease are improved or ameliorated. Efficacy can also be measured by failure of an individual to worsen as assessed by hospitalization or need for medical interventions (e.g., progression of the disease is halted or at least slowed). Methods of measuring these indicators are known to those of skill in the art. Treatment includes: (1) inhibiting the disease, e.g., arresting, or slowing the progression of symptoms; or (2) relieving the disease, e.g., causing regression of symptoms; and (3) preventing or reducing the likelihood of the development of symptoms.

[0354] The article “a” and “an” are used herein to refer to one or more than one (i.e., to at least one) of the grammatical object of the article. By way of example, “a polypeptide” means one or more polypeptides.

[0355] All publications and patent applications mentioned in the specification are indicative of the level of those skilled in the art to which this disclosure pertains. All publications and patent applications are herein incorporated by reference to the same extent as if each individual publication or patent application was specifically and individually indicated to be incorporated by reference.

[0356] Although the foregoing invention has been described in some detail by way of illustration and example for purposes of clarity of understanding, it will be obvious that certain changes and modifications may be practiced within the scope of the appended embodiments.

[0357] Non-limiting embodiments include:
[0358] 1. A promoter comprising a nucleotide sequence having at least 90% sequence identity to the nucleotide sequence set forth as any one of SEQ ID NOs: 6-10.
[0359] 2. The promoter of embodiment 1, wherein said promoter comprises a nucleotide sequence having at least 95% sequence identity to the nucleotide sequence set forth as any one of SEQ ID NOs: 6-10.
[0360] 3. The promoter of embodiment 1, wherein said promoter comprises a nucleotide sequence having 100% sequence identity to the nucleotide sequence set forth as any one of SEQ ID NOs: 6-10.
[0361] 4. The promoter of any one of embodiments 1-3, wherein said promoter comprises a TATA box sequence.
[0362] 5. The promoter of any one of embodiments 1-4, wherein said promoter comprises an octamer (OCT) sequence.
[0363] 6. The promoter of any one of embodiments 1-5, wherein said promoter comprises a SPH sequence.
[0364] 7. The promoter of any one of embodiments 1-6, wherein said promoter comprises a proximal sequence element (PSE).
[0365] 8. A vector comprising the promoter of any one of embodiments 1-7.
[0366] 9. The vector of embodiment 8, wherein said vector is a viral vector.
[0367] 10. The vector of embodiment 9, wherein said viral vector is an adeno-associated viral (AAV) vector.
[0368] 11. An expression construct comprising the promoter of any one of embodiments 1-7 and a coding sequence, wherein said coding sequence is operably linked to said promoter.
[0369] 12. The expression construct of embodiment 11, wherein said coding sequence is heterologous to said promoter.
[0370] 13. The expression construct of embodiment 11 or 12, wherein said coding sequence encodes an RNA.
[0371] 14. The expression construct of embodiment 13, wherein said RNA comprises a guide RNA.
[0372] 15. The expression construct of embodiment 11 or 12, wherein said coding sequence encodes a polypeptide.
[0373] 16. A polynucleotide comprising the expression construct of embodiment 14 and an RNA-guided nuclease (RGN)-encoding nucleotide sequence, wherein said RGN is capable of binding said guide RNA.
[0374] 17. The polynucleotide of embodiment 16, wherein said polynucleotide further comprises an RNA polymerase II (pol II) promoter operably linked to the RGN-encoding nucleotide sequence.
[0375] 18. The polynucleotide of embodiment 16 or 17, wherein said RGN is fused to a base-editing polypeptide.
[0376] 19. The polynucleotide of embodiment 18, wherein said base-editing polypeptide comprises a cytosine deaminase or adenine deaminase.
[0377] 20. The polynucleotide of embodiment 16 or 17, wherein said RGN is fused to a transcriptional activator or transcriptional repressor.
[0378] 21. The polynucleotide of embodiment 16 or 17, wherein said RGN is fused to a detectable label.
[0379] 22. The expression construct of embodiment 13, wherein said RNA is a crRNA.
[0380] 23. A polynucleotide comprising the expression construct of embodiment 22 and a tracrRNA-encoding nucleotide sequence.
[0381] 24. The polynucleotide of embodiment 23, wherein said polynucleotide further comprises an RNA polymerase III (pol III) promoter operably linked to said tracrRNA-encoding nucleotide sequence.
[0382] 25. The polynucleotide of embodiment 24, wherein said pol III promoter comprises a nucleotide sequence having at least 90% sequence identity to the nucleotide sequence set forth as any one of SEQ ID NOs: 1-10.
[0383] 26. The polynucleotide of embodiment 24, wherein said pol III promoter comprises a nucleotide sequence having at least 95% sequence identity to the nucleotide sequence set forth as any one of SEQ ID NOs: 1-10.
[0384] 27. The polynucleotide of embodiment 24, wherein said pol III promoter comprises a nucleotide sequence having 100% sequence identity to the nucleotide sequence set forth as any one of SEQ ID NOs: 1-10.
[0385] 28. The polynucleotide of any one of embodiments 23-27, wherein said polynucleotide further comprises an RNA-guided nuclease (RGN)-encoding nucleotide sequence, wherein said RGN is capable of binding said crRNA and said tracrRNA.
[0386] 29. The polynucleotide of embodiment 28, wherein said polynucleotide further comprises an RNA polymerase II (pol II) promoter operably linked to said RGN-encoding nucleotide sequence.
[0387] 30. The polynucleotide of embodiment 28 or 29, wherein said RGN is fused to a base-editing polypeptide.
[0388] 31. The polynucleotide of embodiment 30, wherein said base-editing polypeptide comprises a cytosine deaminase or adenine deaminase.
[0389] 32. The polynucleotide of embodiment 28 or 29, wherein said RGN is fused to a transcriptional activator or transcriptional repressor.
[0390] 33. The polynucleotide of embodiment 28 or 29, wherein said RGN is fused to a detectable label.
[0391] 34. The expression construct of embodiment 13, wherein said RNA is a tracrRNA.
[0392] 35. A polynucleotide comprising the expression construct of embodiment 34 and a crRNA-encoding nucleotide sequence.
[0393] 36. The polynucleotide of embodiment 35, wherein said polynucleotide further comprises an RNA polymerase III (pol III) promoter operably linked to said crRNA-encoding nucleotide sequence.
[0394] 37. The polynucleotide of embodiment 36, wherein said pol III promoter comprises a nucleotide sequence having at least 90% sequence identity to the nucleotide sequence set forth as any one of SEQ ID NOs: 1-10.
[0395] 38. The polynucleotide of embodiment 36, wherein said pol III promoter comprises a nucleotide sequence having at least 95% sequence identity to the nucleotide sequence set forth as any one of SEQ ID NOs: 1-10.
[0396] 39. The polynucleotide of embodiment 36, wherein said pol III promoter comprises a nucleotide sequence having 100% sequence identity to the nucleotide sequence set forth as any one of SEQ ID NOs: 1-10.
[0397] 40. The polynucleotide of any one of embodiments 35-39, wherein said polynucleotide further comprises an RNA-guided nuclease (RGN)-encoding nucleotide sequence, wherein said RGN is capable of binding to said crRNA and said tracrRNA.
[0398] 41. The polynucleotide of embodiment 40, wherein said polynucleotide further comprises an RNA polymerase II (pol II) promoter operably linked to said RGN-encoding nucleotide sequence.
[0399] 42. The polynucleotide of embodiment 40 or 41, wherein said RGN is fused to a base-editing polypeptide.
[0400] 43. The polynucleotide of embodiment 42, wherein said base-editing polypeptide comprises a cytosine deaminase or adenine deaminase.
[0401] 44. The polynucleotide of embodiment 40 or 41, wherein said RGN is fused to a transcriptional activator or transcriptional repressor.
[0402] 45. The polynucleotide of embodiment 40 or 41, wherein said RGN is fused to a detectable label.
[0403] 46. The expression construct of embodiment 13, wherein said RNA comprises a gene silencing RNA.
[0404] 47. A vector comprising the expression construct of any one of embodiments 11-14, 22, 34, and 46 or the polynucleotide of any one of embodiments 16-21, 23-33, and 35-45.
[0405] 48. The vector of embodiment 47, wherein said vector is a viral vector.
[0406] 49. The vector of embodiment 48, wherein said viral vector is an adeno-associated viral (AAV) vector.
[0407] 50. An expression construct comprising:
[0408] a) a promoter comprising a nucleotide sequence having at least 90% sequence identity to the nucleotide sequence set forth as any one of SEQ ID NOs: 1-5; and
[0409] b) a heterologous coding sequence operably linked to said promoter.
[0410] 51. The expression construct of embodiment 50 wherein said promoter comprises a nucleotide sequence having at least 95% sequence identity to the nucleotide sequence set forth as any one of SEQ ID NOs: 1-5.
[0411] 52. The expression construct of embodiment 50, wherein said promoter comprises a nucleotide sequence having 100% sequence identity to the nucleotide sequence set forth as any one of SEQ ID NOs: 1-5.
[0412] 53. The expression construct of any one of embodiments 50-52, wherein said promoter comprises a TATA box sequence.
[0413] 54. The expression construct of any one of embodiments 50-53, wherein said promoter comprises an octamer (OCT) sequence.
[0414] 55. The expression construct of any one of embodiments 50-54, wherein said promoter comprises a SPH sequence.
[0415] 56. The expression construct of any one of embodiments 50-55, wherein said promoter comprises a proximal sequence element (PSE).
[0416] 57. The expression construct of any one of embodiments 50-56, wherein said heterologous coding sequence encodes an RNA.
[0417] 58. The expression construct of embodiment 57, wherein said RNA comprises a guide RNA.
[0418] 59. The expression construct of any one of embodiments 50-56, wherein said heterologous coding sequence encodes a polypeptide.
[0419] 60. A polynucleotide comprising the expression construct of embodiment 58 and an RNA-guided nuclease (RGN)-encoding nucleotide sequence, wherein said RGN is capable of binding said guide RNA.
[0420] 61. The polynucleotide of embodiment 60, wherein said polynucleotide further comprises an RNA polymerase II (pol II) promoter operably linked to the RGN-encoding nucleotide sequence.
[0421] 62. The polynucleotide of embodiment 60 or 61, wherein said RGN is fused to a base-editing polypeptide.
[0422] 63. The polynucleotide of embodiment 62, wherein said base-editing polypeptide comprises a cytosine deaminase or adenine deaminase.
[0423] 64. The polynucleotide of embodiment 60 or 61, wherein said RGN is fused to a transcriptional activator or transcriptional repressor.
[0424] 65. The polynucleotide of embodiment 60 or 61, wherein said RGN is fused to a detectable label.
[0425] 66. The expression construct of embodiment 57, wherein said RNA is a crRNA.
[0426] 67. A polynucleotide comprising the expression construct of embodiment 66 and a tracrRNA-encoding nucleotide sequence.
[0427] 68. The polynucleotide of embodiment 67, wherein said polynucleotide further comprises an RNA polymerase III (pol III) promoter operably linked to said tracrRNA-encoding nucleotide sequence.
[0428] 69. The polynucleotide of embodiment 68, wherein said pol III promoter comprises a nucleotide sequence having at least 90% sequence identity to the nucleotide sequence set forth as any one of SEQ ID NOs: 1-10.
[0429] 70. The polynucleotide of embodiment 68, wherein said pol III promoter comprises a nucleotide sequence having at least 95% sequence identity to the nucleotide sequence set forth as any one of SEQ ID NOs: 1-10.
[0430] 71. The polynucleotide of embodiment 68, wherein said pol III promoter comprises a nucleotide sequence having 100% sequence identity to the nucleotide sequence set forth as any one of SEQ ID NOs: 1-10.
[0431] 72. The polynucleotide of any one of embodiments 67-71, wherein said polynucleotide further comprises an RNA-guided nuclease (RGN)-encoding nucleotide sequence, wherein said RGN is capable of binding to said crRNA and said tracrRNA.
[0432] 73. The polynucleotide of embodiment 72, wherein said polynucleotide further comprises an RNA polymerase II (pol II) promoter operably linked to said RGN-encoding nucleotide sequence.
[0433] 74. The polynucleotide of embodiment 72 or 73, wherein said RGN is fused to a base-editing polypeptide.
[0434] 75. The polynucleotide of embodiment 74, wherein said base-editing polypeptide comprises a cytosine deaminase or adenine deaminase.
[0435] 76. The polynucleotide of embodiment 72 or 73, wherein said RGN is fused to a transcriptional activator or transcriptional repressor.
[0436] 77. The polynucleotide of embodiment 72 or 73, wherein said RGN is fused to a detectable label.
[0437] 78. The expression construct of embodiment 57, wherein said RNA is a tracrRNA.
[0438] 79. A polynucleotide comprising the expression construct of embodiment 78 and a crRNA-encoding nucleotide sequence.
[0439] 80. The polynucleotide of embodiment 79, wherein said polynucleotide further comprises an RNA polymerase III (pol III) promoter operably linked to said crRNA-encoding nucleotide sequence.
[0440] 81. The polynucleotide of embodiment 80, wherein said pol III promoter comprises a nucleotide sequence having at least 90% sequence identity to the nucleotide sequence set forth as any one of SEQ ID NOs: 1-10.
[0441] 82. The polynucleotide of embodiment 80, wherein said pol III promoter comprises a nucleotide sequence having at least 95% sequence identity to the nucleotide sequence set forth as any one of SEQ ID NOs: 1-10.
[0442] 83. The polynucleotide of embodiment 80, wherein said pol III promoter comprises a nucleotide sequence having 100% sequence identity to the nucleotide sequence set forth as any one of SEQ ID NOs: 1-10.
[0443] 84. The polynucleotide of any one of embodiments 79-83, wherein said polynucleotide further comprises an RNA-guided nuclease (RGN)-encoding nucleotide sequence, wherein said RGN is capable of binding to said crRNA and said tracrRNA.
[0444] 85. The polynucleotide of embodiment 84, wherein said polynucleotide further comprises an RNA polymerase II (pol II) promoter operably linked to said RGN-encoding nucleotide sequence.
[0445] 86. The polynucleotide of embodiment 84 or 85, wherein said RGN is fused to a base-editing polypeptide.
[0446] 87. The polynucleotide of embodiment 86, wherein said base-editing polypeptide comprises a cytosine deaminase or adenine deaminase.
[0447] 88. The polynucleotide of embodiment 84 or 85, wherein said RGN is fused to a transcriptional activator or transcriptional repressor.
[0448] 89. The polynucleotide of embodiment 84 or 85, wherein said RGN is fused to a detectable label.
[0449] 90. The expression construct of embodiment 57, wherein said RNA comprises a gene silencing RNA.
[0450] 91. A vector comprising the expression construct of any one of embodiments 50-59, 66, 78, and 90 or the polynucleotide of any one of embodiments 60-65, 67-77, and 79-89.
[0451] 92. The vector of embodiment 91, wherein said vector is a viral vector.
[0452] 93. The vector of embodiment 92, wherein said viral vector is an adeno-associated viral (AAV) vector.
[0453] 94. A cell comprising the promoter of any one of embodiments 1-7, the expression construct of any one of embodiments 11-15, 22, 34, 46, 50-59, 66, 78, and 90, the polynucleotide of any one of embodiments 16-21, 23-33, 35-45, 60-65, 67-77, and 79-89, or the vector of any one of embodiments 8-10, 47-49, and 91-93.
[0454] 95. The cell of embodiment 94, wherein said cell is a prokaryotic cell.
[0455] 96. The cell of embodiment 94, wherein said cell is a eukaryotic cell.
[0456] 97. The cell of embodiment 95, wherein said eukaryotic cell is a mammalian cell.
[0457] 98. The cell of embodiment 97, wherein said mammalian cell is a human cell.
[0458] 99. The cell of embodiment 98, wherein said human cell is an immune cell.
[0459] 100. The cell of embodiment 99, wherein said immune cell is a stem cell.
[0460] 101. The cell of embodiment 100, wherein said stem cell is an induced pluripotent stem cell.
[0461] 102. The cell of embodiment 96, wherein said eukaryotic cell is an insect or avian cell.
[0462] 103. The cell of embodiment 96, wherein said eukaryotic cell is a fungal cell.
[0463] 104. The cell of embodiment 96, wherein said eukaryotic cell is a plant cell.
[0464] 105. A plant comprising the promoter of any one of embodiments 1-7, the expression construct of any one of embodiments 11-15, 22, 34, 46, 50-59, 66, 78, and 90, the polynucleotide of any one of embodiments 16-21, 23-33, 35-45, 60-65, 67-77, and 79-89, the vector of any one of embodiments 8-10, 47-49, and 91-93, or the cell of embodiment 104.
[0465] 106. A seed comprising the cell of embodiment 104.
[0466] 107. A pharmaceutical composition comprising a pharmaceutically acceptable carrier and the expression construct of any one of embodiments 11-15, 22, 34, 46, 50-59, 66, 78, and 90, the polynucleotide of any one of embodiments 16-21, 23-33, 35-45, 60-65, 67-77, and 79-89, the vector of any one of embodiments 47-49 and 91-93, or the cell of any one of embodiments 97-101.
[0467] 108. The pharmaceutical composition of embodiment 107, wherein the pharmaceutical composition is lipid-based.
[0468] 109. The pharmaceutical composition of embodiment 108, wherein the lipid-based pharmaceutical composition comprises liposomes or lipid nanoparticles (LNPs).
[0469] 110. The pharmaceutical composition of embodiment 109, wherein the expression construct, the polynucleotide, the vector, or the cell is encapsulated in, and/or non-covalently or covalently attached to the liposomes or the LNPs.
[0470] 111. A method for preparing an expression construct wherein said method comprises inserting a coding sequence into a nucleic acid molecule comprising the promoter of any one of embodiments 1-7 such that the coding sequence is operably linked to said promoter.
[0471] 112. A method for preparing an expression construct wherein said method comprises inserting a promoter comprising a nucleotide sequence having at least 90% sequence identity to the nucleotide sequence set forth as any one of SEQ ID NOs: 6-10 into a nucleic acid molecule comprising a coding sequence such that the coding sequence is operably linked to said promoter.
[0472] 113. The method of embodiment 112, wherein said promoter comprises a nucleotide sequence having at least 95% sequence identity to the nucleotide sequence set forth as any one of SEQ ID NOs: 6-10.
[0473] 114. The method of embodiment 112, wherein said promoter comprises a nucleotide sequence having 100% sequence identity to the nucleotide sequence set forth as any one of SEQ ID NOs: 6-10.
[0474] 115. The method of any one of embodiments 112-114, wherein said promoter comprises a TATA box sequence.
[0475] 116. The method of any one of embodiments 112-115, wherein said promoter comprises an octamer (OCT) sequence.
[0476] 117. The method of any one of embodiments 112-116, wherein said promoter comprises a SPH sequence.
[0477] 118. The method of any one of embodiments 112-117, wherein said promoter comprises a proximal sequence element (PSE).
[0478] 119. The method of any one of embodiments 112-118, wherein said coding sequence is heterologous to said promoter.
[0479] 120. The method of any one of embodiments 112-119, wherein said coding sequence encodes an RNA.
[0480] 121. The method of embodiment 120, wherein said RNA comprises a guide RNA.
[0481] 122. The method of embodiment 120, wherein said RNA is a crRNA.
[0482] 123. The method of embodiment 120, wherein said RNA is a tracrRNA.
[0483] 124. The method of embodiment 120, wherein said RNA comprises a gene silencing RNA.
[0484] 125. The method of any one of embodiments 111-119, wherein said coding sequence encodes a polypeptide.
[0485] 126. A method for expressing an RNA, said method comprising contacting in vitro the expression construct of any one of embodiments 13, 14, 22, 34, 46, 57, 58, 66, 78, and 90, or the polynucleotide of any one of embodiments 16-21, 23-33, 35-45, 60-65, 67-77, and 79-89 with RNA polymerase III and ribonucleotide triphosphates.
[0486] 127. A method for expressing an RNA in a cell, said method comprising introducing into said cell the expression construct of any one of embodiments 13, 14, 22, 34, 46, 57, 58, 66, 78, and 90, or the polynucleotide of any one of embodiments 16-21, 23-33, 35-45, 60-65, 67-77, and 79-89.
[0487] 128. A method for expressing a polypeptide in a cell, said method comprising introducing into said cell the expression construct of embodiment 15.
[0488] 129. A method for making an RGN ribonucleoprotein complex in a cell, said method comprising introducing into a cell the polynucleotide of any one of embodiments 16-21, 28-33, 40-45, 60-65, 72-77, and 84-89, wherein the RGN and the gRNA form an RGN ribonucleoprotein complex.
[0489] 130. The method of embodiment 129, further comprising purifying said RGN ribonucleoprotein complex.
[0490] 131. A method for making an mRNA in vitro, said method comprising contacting the expression construct of embodiment 15 or 59 with RNA polymerase II and ribonucleotide triphosphates.
[0491] 132. The method of embodiment 131, wherein said method further comprises contacting the expression construct with a cap analog to generate a capped mRNA.
[0492] 133. The method of embodiment 131 or 132, wherein said method further comprises contacting the capped mRNA with a poly(A) polymerase to generate a capped and tailed mRNA.
[0493] 134. The method of embodiment 132 or 133, wherein said method further comprises contacting said capped mRNA or said capped and tailed mRNA in vitro with a cell-free lysate to generate an in vitro translated polypeptide.
[0494] 135. A method for binding a target nucleic acid molecule in a cell, wherein said target nucleic acid molecule comprises a target sequence, said method comprising introducing into said cell the polynucleotide of any one of embodiments 16-21, 28-33, 40-45, 60-65, 72-77, and 84-89, wherein said guide RNA of any one of embodiments 16-21, and 60-65 or the crRNA and tracrRNA of the polynucleotide of any one of embodiments 28-33, 40-45, 72-77, and 84-89 binds to said RGN, thereby directing said RGN to bind to said target sequence within said target nucleic acid molecule.
[0495] 136. A method for cleaving and/or modifying a target nucleic acid molecule in a cell, wherein said target nucleic acid molecule comprises a target sequence, said method comprising introducing into said cell the polynucleotide of any one of embodiments 16-19, 28-31, 40-43, 60-63, 72-75, and 84-87, wherein said guide RNA of any one of embodiments 16-19, 60-63 or the crRNA and tracrRNA of the polynucleotide of any one of embodiments 28-31, 40-43, 72-75, and 84-87 binds to said RGN, thereby directing said RGN to bind to said target sequence and cleave and/or modify said target nucleic acid molecule.
[0496] 137. A method for modifying the expression of a target gene in a cell, wherein said target gene comprises a target sequence, said method comprising introducing into said cell the polynucleotide of any one of embodiments 20, 32, 44, 64, 76, and 88, wherein said guide RNA of embodiment 20 or 64 or the crRNA and tracrRNA of the polynucleotide of any one of embodiments 32, 44, 76, and 88 binds to said RGN, thereby directing said RGN to said target sequence and modifying the expression of said target gene.
[0497] 138. A method for detecting a target sequence in a cell, said method comprising introducing into said cell the polynucleotide of any one of embodiments 21, 33, 45, 65, 77, and 89, wherein said guide RNA of embodiment 21 or 65 or the crRNA and tracrRNA of the polynucleotide of any one of embodiments 33, 45, 77, and 89 binds to said RGN, thereby directing said RGN to said target sequence; and detecting said detectable label.
[0498] 139. A method for binding a target nucleic acid molecule in a cell, wherein said target nucleic acid molecule comprises a target sequence, wherein said method comprises introducing into said cell the expression construct of embodiment 14 or 58, or the polynucleotide of any one of embodiments 23-27, 35-39, 67-71, and 79-83, wherein said cell comprises an RNA-guided nuclease (RGN); and wherein said guide RNA of embodiment 14 or 58, or the crRNA and tracrRNA of the polynucleotide of any one of embodiments 23-27, 35-39, 67-71, and 79-83 binds to said RGN, thereby directing said RGN to bind said target sequence within said target nucleic acid molecule.
[0499] 140. A method for cleaving and/or modifying a target nucleic acid molecule in a cell, wherein said target nucleic acid molecule comprises a target sequence, wherein said method comprises introducing into said cell the expression construct of embodiment 14 or 58, or the polynucleotide of any one of embodiments 23-27, 35-39, 67-71, and 79-83, wherein said cell comprises:
[0500] a) an RNA-guided nuclease (RGN); or
[0501] b) a fusion protein comprising a nuclease-inactive or nickase RGN fused to a base-editing polypeptide;
[0502] and wherein said guide RNA of embodiment 14 or 58, or the crRNA and tracrRNA of the polynucleotide of any one of embodiments 23-27, 35-39, 67-71, and 79-83 binds to said RGN, thereby directing said RGN or said fusion protein to bind to said target sequence and cleave and/or modify said target nucleic acid molecule.
[0503] 141. The method of embodiment 140, further comprising introducing said RGN or said fusion protein or a nucleic acid molecule encoding the same into said cell prior to or simultaneously with the introduction of said expression construct of embodiment 14 or 58, or the polynucleotide of any one of embodiments 23-27, 35-39, 67-71, and 79-83.
[0504] 142. A method for modifying the expression of a target gene, wherein said target gene comprises a target sequence, wherein said method comprises introducing into said cell the expression construct of embodiment 14 or 58, or the polynucleotide of any one of embodiments 23-27, 35-39, 67-71, and 79-83, wherein said cell comprises a fusion protein comprising an RNA-guided nuclease (RGN) fused to a transcriptional activator or transcriptional repressor, and wherein said guide RNA of embodiment 14 or 58, or the crRNA and tracrRNA of the polynucleotide of any one of embodiments 23-27, 35-39, 67-71, and 79-83 binds to said RGN, thereby directing said fusion protein to said target sequence and modifying the expression of said target gene.
[0505] 143. The method of embodiment 142, further comprising introducing said fusion protein or a nucleic acid molecule encoding the same into said cell prior to or simultaneously with the introduction of said expression construct of embodiment 14 or 58, or the polynucleotide of any one of embodiments 23-27, 35-39, 67-71, and 79-83.
[0506] 144. A method for detecting a target sequence in a cell, wherein said method comprises introducing into said cell the expression construct of embodiment 14 or 58, or the polynucleotide of any one of embodiments 23-27, 35-39, 67-71, and 79-83, wherein said cell comprises a fusion protein comprising an RNA-guided nuclease (RGN) fused to a detectable label, and wherein said guide RNA of embodiment 14 or 58, or the crRNA and tracrRNA of the polynucleotide of any one of embodiments 23-27, 35-39, 67-71, and 79-83 binds to said RGN, thereby directing said fusion protein to said target sequence; and detecting said detectable label.
[0507] 145. The method of embodiment 144, further comprising introducing said fusion protein or a nucleic acid molecule encoding the same into said cell prior to or simultaneously with the introduction of said expression construct of embodiment 14 or 58, or the polynucleotide of any one of embodiments 23-27, 35-39, 67-71, and 79-83.
[0508] 146. A method for binding a target nucleic acid molecule in a cell, wherein said target nucleic acid molecule comprises a target sequence, wherein said method comprises:
[0509] a) introducing into said cell the expression construct of embodiment 14 or 58, or the polynucleotide of any one of embodiments 23-27, 35-39, 67-71, and 79-83; and
[0510] b) introducing into said cell:
   [0511] i) an RNA-guided nuclease (RGN); or
   [0512] ii) a nucleic acid molecule encoding an RGN;
   [0513] wherein said step a) occurs before, during, or after step b); and
[0514] wherein said guide RNA of embodiment 14 or 58, or the crRNA and tracrRNA of the polynucleotide of any one of embodiments 23-27, 35-39, 67-71, and 79-83 binds to said RGN, thereby directing said RGN to bind said target sequence within said target nucleic acid molecule.
[0515] 147. A method for cleaving and/or modifying a target nucleic acid molecule in a cell, wherein said target nucleic acid molecule comprises a target sequence, wherein said method comprises:
[0516] a) introducing into said cell the expression construct of embodiment 14 or 58, or the polynucleotide of any one of embodiments 23-27, 35-39, 67-71, and 79-83; and
[0517] b) introducing into said cell:
   [0518] i) an RNA-guided nuclease (RGN);
   [0519] ii) a fusion protein comprising a nuclease-inactive or nickase RGN fused to a base-editing polypeptide;
   [0520] iii) a nucleic acid molecule encoding an RGN; or
   [0521] iv) a nucleic acid molecule encoding a fusion protein comprising a nuclease-inactive or nickase RGN fused to a base-editing polypeptide;
   [0522] wherein said step a) occurs before, during, or after step b); and
[0523] wherein said guide RNA of embodiment 14 or 58, or the crRNA and tracrRNA of the polynucleotide of any one of embodiments 23-27, 35-39, 67-71, and 79-83 binds to said RGN, thereby directing said RGN or said fusion protein to bind to said target sequence and cleave and/or modify said target nucleic acid molecule.
[0524] 148. The method of embodiment 147, wherein said step b) iii) comprises introducing a polynucleotide comprising said nucleic acid molecule encoding said RGN or the step b) iv) comprises introducing a polynucleotide comprising said nucleic acid molecule encoding said fusion protein, and wherein said polynucleotide further comprises an RNA polymerase II (pol II) promoter operably linked to said nucleic acid molecule encoding said RGN or said nucleic acid molecule encoding said fusion protein.
[0525] 149. A method for modifying the expression of a target gene in a cell, wherein said target gene comprises a target sequence, wherein said method comprises:
[0526] a) introducing into said cell the expression construct of embodiment 14 or 58, or the polynucleotide of any one of embodiments 23-27, 35-39, 67-71, and 79-83; and
[0527] b) introducing into said cell:
   [0528] i) a fusion protein comprising a nuclease-inactive RNA-guided nuclease (RGN) fused to a transcriptional activator or transcriptional repressor; or
   [0529] ii) a nucleic acid molecule encoding a fusion protein comprising a nuclease-inactive RGN fused to a transcriptional activator or transcriptional repressor;
   [0530] wherein said step a) occurs before, during, or after step b); and
   [0531] wherein said guide RNA of embodiment 14 or 58, or the crRNA and tracrRNA of the polynucleotide of any one of embodiments 23-27, 35-39, 67-71, and 79-83 binds to said RGN, thereby directing said fusion protein to said target sequence and modifying the expression of said target gene.
[0532] 150. The method of embodiment 149, wherein said step b) ii) comprises introducing a polynucleotide comprising said nucleic acid molecule encoding said fusion protein, and wherein said polynucleotide further comprises an RNA polymerase II (pol II) promoter operably linked to said nucleic acid molecule encoding said fusion protein.
[0533] 151. A method for detecting a target sequence in a cell, wherein said method comprises:
[0534] a) introducing into said cell the expression construct of embodiment 14 or 58, or the polynucleotide of any one of embodiments 23-27, 35-39, 67-71, and 79-83;
[0535] b) introducing into said cell:
   [0536] i) a fusion protein comprising nuclease-inactive RNA-guided nuclease (RGN) fused to a detectable label; or
   [0537] ii) a nucleic acid molecule encoding a fusion protein comprising a nuclease-inactive RGN fused to a detectable label; and
[0538] c) detecting said detectable label;
[0539] wherein step a) occurs before, during, or after step b); and
[0540] wherein said guide RNA of embodiment 14 or 58, or the crRNA and tracrRNA of the polynucleotide of any one of embodiments 23-27, 35-39, 67-71, and 79-83 binds to said RGN and directs said fusion protein to said target sequence.
[0541] 152. The method of embodiment 151, wherein said step b) ii) comprises introducing into said cell a polynucleotide comprising said nucleic acid molecule encoding said fusion protein, and wherein said polynucleotide further comprises an RNA polymerase II (pol II) promoter operably linked to said nucleic acid molecule encoding said fusion protein.
[0542] 153. A method for reducing the expression of a target gene in a cell, said method comprising introducing the expression construct of embodiment 46 or 90, wherein said gene silencing RNA reduces the expression of said target gene.
[0543] 154. A method for treating a disease, said method comprising administering to a subject in need thereof a pharmaceutical composition comprising a pharmaceutically acceptable carrier and a polynucleotide of any one of embodiments 16-19, 28-31, 40-43, 60-63, 72-75, and 84-87.
[0544] 155. The method of embodiment 154, wherein said disease is associated with a causal mutation and said pharmaceutical composition corrects said causal mutation.
[0545] 156. Use of the polynucleotide of any one of embodiments 16-19, 28-31, 40-43, 60-63, 72-75, and 84-87 for the treatment of a disease in a subject.
[0546] 157. The use of embodiment 156, wherein said disease is associated with a causal mutation and said treatment comprises correcting said causal mutation.
[0547] 158. Use of the polynucleotide of any one of embodiments 16-19, 28-31, 40-43, 60-63, 72-75, and 84-87 for the manufacture of a medicament useful for treating a disease.
[0548] 159. The use of embodiment 158, wherein said disease is associated with a causal mutation and said medicament corrects said causal mutation.
[0549] 160. A method for treating a disease, said method comprising administering to a subject in need thereof a pharmaceutical composition comprising a pharmaceutically acceptable carrier and a polynucleotide of any one of embodiments 20, 32, 44, 64, 76, and 88, wherein said disease is associated with the expression of a target gene, wherein said target gene comprises a target sequence, and wherein said guide RNA of said polynucleotide of embodiment 20 or 64 or the crRNA and tracrRNA of said polynucleotide of any one of embodiments 32, 44, 76, and 88 binds to said RGN, thereby directing said RGN to said target sequence and modifying the expression of said target gene.
[0550] 161. Use of the polynucleotide of any one of embodiments 20, 32, 44, 64, 76, and 88 for the treatment of a disease associated with the expression of a target gene in a subject.
[0551] 162. Use of the polynucleotide of any one of embodiments 20, 32, 44, 64, 76, and 88 for the manufacture of a medicament useful for treating a disease associated with the expression of a target gene.
[0552] 163. A method for treating a disease, said method comprising administering to a subject in need thereof a pharmaceutical composition comprising a pharmaceutically acceptable carrier and an expression construct of embodiment 46 or 90, wherein said disease is associated with the overexpression of a target gene, and wherein said gene silencing RNA reduces the expression of said target gene.
[0553] 164. Use of the expression construct of embodiment 46 or 90 for the treatment of a disease associated with the overexpression of a target gene in a subject.
[0554] 165. Use of the expression construct of embodiment 46 or 90 for the manufacture of a medicament useful for treating a disease associated with the overexpression of a target gene.

[0555] The following examples are offered by way of illustration and not by way of limitation.

### EXAMPLES

### Example 1. Demonstration of Programmable DNA Cleavage Including Editing in Eukaryotic Cells Using Novel Pol III Promoters

[0556] Novel RNA polymerase III promoters were identified and are set forth in Table 2 as SEQ ID NOs: 1-5. Truncated versions of the Pol III promoters set forth as SEQ ID NOs: 1-5 were generated and are set forth as SEQ ID NOs: 6-10, respectively.

TABLE 2
Promoter sequences

| Promoter | SEQ ID |
|---|---|
| NC_041760 | 1 |
| NW_004848155 | 2 |
| LR738627 | 3 |
| NC_044556 | 4 |
| XM_030845548 | 5 |
| Mini NC_041760 | 6 |
| Mini NW_004848155 | 7 |
| Mini LR738627 | 8 |
| Mini NC_044556 | 9 |
| Mini XM_030845548 | 10 |

[0557] Guide RNA expression constructs encoding a single gRNA from Table 3, each under the control of a polymerase III promoter from Table 2 or the human U6 promoter set forth as SEQ ID NO: 11 were synthesized and cloned into the pTwist High Copy Amp vector.

TABLE 3
Guide RNA sequences

| | | | Forward | Reverse |
|---|---|---|---|---|
| | sgRNA | Target | primer for | primer for |
| | sequence | sequence | amplification | amplification |
| | (SEQ | (SEQ | (SEQ | (SEQ |
| sgRNA ID | ID NO) | ID NO) | ID NO) | ID NO) |
| SGN000169 | 12 | 13 | 14 | 15 |
| SGN000173 | 16 | 17 | 18 | 19 |
| SGN000929 | 20 | 21 | 22 | 23 |
| SGN001101 | 24 | 25 | 26 | 27 |
| SGN000143 | 28 | 29 | 30 | 31 |
| SGN000930 | 32 | 33 | 34 | 35 |

[0558] 500 ng of plasmid comprising an expression cassette encoding for an sgRNA shown in Table 4 were transfected into HEK293FT cells having stably incorporated an expression construct expressing the APG08290.1 RGN (set forth as SEQ ID NO: 52, which was disclosed in International Patent Publ. No WO 2019/236566, which is herein incorporated by reference in its entirety), with cells at 75-90% confluency in 24-well plates using Lipofectamine 2000 reagent (Life Technologies).

TABLE 4
Full Length Promoter guide RNA sequences

| | U6 sgRNA | NC_041760 | NW_004848155 | LR738627 | NC_044556 | XM_030845548 |
|---|---|---|---|---|---|---|
| sgRNA ID | ID | sgRNA ID | sgRNA ID | sgRNA ID | sgRNA ID | sgRNA ID |
| SGN000143 | SGN000143 | SGN001022 | SGN001029 | SGN001018 | SGN001025 | SGN001037 |

[0559] Cells were then incubated at 37° C. for 72 h. Following incubation, genomic DNA was extracted using NucleoSpin 96 Tissue (Macherey-Nagel) following the manufacturer's protocol. The genomic region flanking the targeted genomic site was PCR amplified using the primers in Table 3 and products were purified using ZR-96 DNA Clean and Concentrator (Zymo Research) following the manufacturer's protocol. The purified PCR products were then sent for Next Generation Sequencing on Illumina MiSeq (2×250). Results were analyzed for INDEL formation and are provided in Table 5.

TABLE 5
Programmable DNA editing with Novel Polymerase III promoters

| Promoter sgRNA | % INDEL formation |
|---|---|
| SGN001022 | 12.10% |
| SGN001029 | 9.40% |
| SGN001018 | 6.30% |
| SGN001025 | 14.20% |
| SGN001037 | 14.30% |
| SGN000143 | 13.70% |

[0560] Table 5 provides INDEL formation caused by the same sgRNA sequence, the expression of which was driven by different polymerase III promoters, demonstrating successful editing by the RGN when the sgRNA is expressed by each of these promoters.

[0561] To determine if the truncated mini promoters are active, 500 ng of plasmid comprising an expression cassette comprising a coding sequence for the APG08290.1 RGN (set forth as SEQ ID NO: 53, which was disclosed in International Patent Publ. No. WO 2019/236566) and 500 ng of plasmid comprising an expression cassette encoding for an sgRNA shown in Table 6 were co-transfected into HEK293FT cells at 75-90% confluency in 24-well plates using Lipofectamine 2000 reagent (Life Technologies).

TABLE 6
Mini Promoter guide RNA sequences

| | U6 | LR738627 | Mini |
|---|---|---|---|
| sgRNA ID | sgRNA ID | sgRNA ID | LR738627 |
| SGN001101 | SGN001101 | SGN001819 | SGN001828 |
| SGN000929 | SGN000929 | SGN001820 | SGN001829 |
| SGN000169 | SGN000169 | SGN001821 | SGN001830 |
| SGN000143 | SGN000143 | SGN001018 | SGN001833 |
| SGN000173 | SGN000173 | SGN001822 | SGN001831 |
| SGN000930 | SGN000930 | SGN001823 | SGN001832 |

[0562] Cells were then incubated at 37° C. for 72 h. Following incubation, genomic DNA was extracted using NucleoSpin 96 Tissue (Macherey-Nagel) following the manufacturer's protocol. The genomic region flanking the targeted genomic site was PCR amplified using the primers in Table 3 and products were purified using ZR-96 DNA Clean and Concentrator (Zymo Research) following the manufacturer's protocol. The purified PCR products were then sent for Next Generation Sequencing on Illumina MiSeq (2×250). Results were analyzed for INDEL formation and are provided in Table 7.

TABLE 7
Programmable DNA editing with Novel and
Shortened Polymerase III promoters

| | | |
|---|---|---|
| sgRNA ID | sgRNA Target | % Editing |

U6 promoter

| | | |
|---|---|---|
| SGN001101 | SGN001101 | 14.9% |
| SGN000929 | SGN000929 | 15.4% |
| SGN000169 | SGN000169 | 20.1% |
| SGN000143 | SGN000143 | 1.6% |
| SGN000173 | SGN000173 | 14.8% |
| SGN000930 | SGN000930 | 14.9% |

LR738627 promoter

| | | |
|---|---|---|
| SGN001819 | SGN001101 | 10.2% |
| SGN001820 | SGN000929 | 12.2% |
| SGN001821 | SGN000169 | 18.4% |
| SGN001018 | SGN000143 | 0.5% |
| SGN001822 | SGN000173 | 17.2% |
| SGN001823 | SGN000930 | 12.1% |

Mini LR738627 promoter

| | | |
|---|---|---|
| SGN001828 | SGN001101 | 5.6% |
| SGN001829 | SGN000929 | 12.2% |
| SGN001830 | SGN000169 | 18.6% |
| SGN001833 | SGN000143 | 0.7% |
| SGN001831 | SGN000173 | 12.0% |
| SGN001832 | SGN000930 | 11.5% |

[0563] Table 7 provides INDEL formation caused by the same sgRNA sequence driven by different polymerase III promoters, demonstrating successful editing at a multitude of targets. The high editing rates confirm that the shortened polymerase III promoters are active for expressing guide RNAs.

The application's sequence listing, which the Patent Office published only in electronic form, follows.

SEQUENCE LISTING (272 sequences)

SEQ ID NO: 1 - DNA, 300 bp, Artificial Sequence
  Description of Artificial Sequence: Synthetic polynucleotide
  NC_041760 promoter
agctccacggcaagagaattcaaagccgcgggcctgggttccacgcggggccccttacccaaggtgccccgggcgctcatttgcatgtcccacccaacaggtaaacctgacaggtcagtcgcggccgggtacggcctggcggtcagagcaccaaacgtacgagccttgtgatgcggttccattgcatgaaattctcctaaaggccccaagatgaacgggaaagcgcgcggttcgctcaccgtaactaaaacaggtgagagactcccgtgccttataaggcctgtggacggaggcagttgc

SEQ ID NO: 2 - DNA, 300 bp, Artificial Sequence
  Description of Artificial Sequence: Synthetic polynucleotide
  NW_004848155 promoter
tgttctccgaacagtacttgtaatatacaggttccccgatccaccaccgtctgcgggtggcggtacagcctctcccagtgtgctttgcgctcatttgcatagagcacggcaccgaacgcagccactgtcccccgcgtccgctgtcccccgtgcaggccaaacccgggcgcggccccgccgacggtgggtacagagagtggtcggctcggcaccggctgctgcgcggcaccggcactcaccctgtccttatggagccctaactccatggctataaatatctaaggggaggaagggtagatc

SEQ ID NO: 3 - DNA, 300 bp, Artificial Sequence
  Description of Artificial Sequence: Synthetic polynucleotide
  LR738627 promoter
agcgctccgcggagacttctgggacgcggcggctccgactccgccccgcttccggcttatttgcatacagcaattcctagcaggccctgtgctgaatttagtcggaaaactaccatgttcagtcgaaaaagcaaatacttttgtcagatatggccaaaaacttcacttgacttagccgtgtttcatgtaaagcattaaaaggatggagtgattgttcaaatttcataagaagaattcaccttcagtttaaggtggttcgctttctgcacttcaaataccgcggtggacagaccctgtttc

SEQ ID NO: 4 - DNA, 300 bp, Artificial Sequence
  Description of Artificial Sequence: Synthetic polynucleotide
  NC_044556 promoter
gcctgagtcgcgccgccgcctcccaaagacttctgggaaggcggtgcggctcaggctccgccccgcttccggggatatttgcatacgagcattcccagtaattcccagcagccactgtagctatatttggtagaataacgagcactttctgaactccagttaataactgcgttagttgcgttacacattggactaaaacaaatagaagttgaatctctagagcagtggagataagtcgccgtatgtgtacagaaattgcttccgggggctataaatagctggtagtggggctagaacgtc

SEQ ID NO: 5 - DNA, 300 bp, Artificial Sequence
  Description of Artificial Sequence: Synthetic polynucleotide
  XM_030845548 promoter
cgcccgcgcagcgcagccgcttcccagagacttctgggacggcagcggctgcggctccgcccctcttccagtataatttgcatgcgaccatggattcccagcagccacctgagtcatatttggtggaacaaaaaccactttctcaatttcagtgaatgaccccatttggttaaggtattgttgcacaaatatcataaaagaagggacgaatggctgaaccggtttttaatggagttcgcccttagcgtaaaagagtttattctatgccctctaaatagttctgggatcaaccgtactact

SEQ ID NO: 6 - DNA, 111 bp, Artificial Sequence
  Description of Artificial Sequence: Synthetic polynucleotide
  Mini NC_041760 promoter
ccccttacccaaggtgccccgggcgctcatttgcatgtcccaccgctcaccgtaactaaaacaggtgagagactcccgtgccttataaggcctgtggacggaggcagttgc

SEQ ID NO: 7 - DNA, 111 bp, Artificial Sequence
  Description of Artificial Sequence: Synthetic polynucleotide
  Mini NW_004848155 promoter
acagcctctcccagtgtgctttgcgctcatttgcatagagcacgactcaccctgtccttatggagccctaactccatggctataaatatctaaggggaggaagggtagatc

SEQ ID NO: 8 - DNA, 111 bp, Artificial Sequence
  Description of Artificial Sequence: Synthetic polynucleotide
  Mini LR738627 promoter
ggctccgactccgccccgcttccggcttatttgcatacagcaatattcaccttcagtttaaggtggttcgctttctgcacttcaaataccgcggtggacagaccctgtttc

SEQ ID NO: 9 - DNA, 111 bp, Artificial Sequence
  Description of Artificial Sequence: Synthetic polynucleotide
  Mini NC_044556 promoter
gctcaggctccgccccgcttccggggatatttgcatacgagcatagtcgccgtatgtgtacagaaattgcttccgggggctataaatagctggtagtggggctagaacgtc

SEQ ID NO: 10 - DNA, 111 bp, Artificial Sequence
  Description of Artificial Sequence: Synthetic polynucleotide
  Mini XM_030845548 promoter
gctgcggctccgcccctcttccagtataatttgcatgcgaccatgttcgcccttagcgtaaaagagtttattctatgccctctaaatagttctgggatcaaccgtactact

SEQ ID NO: 11 - DNA, 318 bp, Homo sapiens
  hU6 promoter
tgtacaaaaaagcaggctttaaaggaaccaattcagtcgactggatccggtaccaaggtcgggcaggaagagggcctatttcccatgattccttcatatttgcatatacgatacaaggctgttagagagataattagaattaatttgactgtaaacacaaagatattagtacaaaatacgtgacgtagaaagtaataatttcttgggtagtttgcagttttaaaattatgttttaaaatggactatcatatgcttaccgtaacttgaaagtatttcgatttcttggctttatatatcttgtggaaaggacgaaacacc

SEQ ID NO: 12 - RNA, 130 nt, Artificial Sequence
  Description of Artificial Sequence: Synthetic polynucleotide
  SGN000169 sgRNA
cacaucucgagcaagacguugucauaguuccauuaaagccaaaaguggcuuugauguuucuaugauaaggguuucgacccguggcgucggggaucgccugcccauugaaaugggcuucuccccauuuauu

SEQ ID NO: 13 - DNA, 20 bp, Homo sapiens
  SGN000169 target sequence
cacatctcgagcaagacgtt

SEQ ID NO: 14 - DNA, 53 bp, Artificial Sequence
  Description of Artificial Sequence: Synthetic primer
  SGN000169 forward primer
tcgtcggcagcgtcagatgtgtataagagacaggttcactccagcctcaacat

SEQ ID NO: 15 - DNA, 54 bp, Artificial Sequence
  Description of Artificial Sequence: Synthetic primer
  SGN000169 reverse primer
gtctcgtgggctcggagatgtgtataagagacaggtaatccagcaggtcagcaa

SEQ ID NO: 16 - RNA, 130 nt, Artificial Sequence
  Description of Artificial Sequence: Synthetic polynucleotide
  SGN000173 sgRNA
cuucuauagccuccuuccccgucauaguuccauuaaagccaaaaguggcuuugauguuucuaugauaaggguuucgacccguggcgucggggaucgccugcccauugaaaugggcuucuccccauuuauu

SEQ ID NO: 17 - DNA, 20 bp, Homo sapiens
  SGN000173 target sequence
cttctatagcctccttcccc

SEQ ID NO: 18 - DNA, 53 bp, Artificial Sequence
  Description of Artificial Sequence: Synthetic primer
  SGN000173 forward primer
tcgtcggcagcgtcagatgtgtataagagacaggcagtataactggccagcct

SEQ ID NO: 19 - DNA, 56 bp, Artificial Sequence
  Description of Artificial Sequence: Synthetic primer
  SGN000173 reverse primer
gtctcgtgggctcggagatgtgtataagagacagtcagttgaggagttcagcttaa

SEQ ID NO: 20 - RNA, 135 nt, Artificial Sequence
  Description of Artificial Sequence: Synthetic polynucleotide
  SGN000929 sgRNA
aucuggagggaacuuacagcauauggucauaguuccaugaaagccaaaaguggcuuugauguuucuaugauaaggguuucggcccguggcgucggggaucgccugcccauuccgaugggcuucuccccauuuauu

SEQ ID NO: 21 - DNA, 25 bp, Homo sapiens
  SGN000929 target sequence
atctggagggaacttacagcatatg

SEQ ID NO: 22 - DNA, 53 bp, Artificial Sequence
  Description of Artificial Sequence: Synthetic primer
  SGN000929 forward primer
tcgtcggcagcgtcagatgtgtataagagacagaatgaagccaggcaagagca

SEQ ID NO: 23 - DNA, 54 bp, Artificial Sequence
  Description of Artificial Sequence: Synthetic primer
  SGN000929 reverse primer
gtctcgtgggctcggagatgtgtataagagacagctgtgcaaacccaggctaga

SEQ ID NO: 24 - RNA, 130 nt, Artificial Sequence
  Description of Artificial Sequence: Synthetic polynucleotide
  SGN001101 sgRNA
auauuuucuuuaauggugccaggcagucauaguuccauuaaagccaaaaguggcuuugauguuucuaugauaaggguuucgacccguggcgucggggaucgccugcccauugaaaugggcuucuccccau

SEQ ID NO: 25 - DNA, 25 bp, Homo sapiens
  SGN001101 target sequence
atattttctttaatggtgccaggca

SEQ ID NO: 26 - DNA, 55 bp, Artificial Sequence
  Description of Artificial Sequence: Synthetic primer
  SGN001101 forward primer
tcgtcggcagcgtcagatgtgtataagagacagtgcatagcagagtacctgaaac

SEQ ID NO: 27 - DNA, 55 bp, Artificial Sequence
  Description of Artificial Sequence: Synthetic primer
  SGN001101 reverse primer
gtctcgtgggctcggagatgtgtataagagacagcatgctttgatgacgcttctg

SEQ ID NO: 28 - RNA, 130 nt, Artificial Sequence
  Description of Artificial Sequence: Synthetic polynucleotide
  SGN000143 sgRNA
cauggcaguacauuagagcagucauaguuccauuaaagccaaaaguggcuuugauguuucuaugauaaggguuucgacccguggcgucggggaucgccugcccauugaaaugggcuucuccccauuuauu

SEQ ID NO: 29 - DNA, 20 bp, Homo sapiens
  SGN000143 target sequence
catggcagtacattagagca

SEQ ID NO: 30 - DNA, 52 bp, Artificial Sequence
  Description of Artificial Sequence: Synthetic primer
  SGN000143 forward primer
tcgtcggcagcgtcagatgtgtataagagacagacatttgacgagcagcgaa

SEQ ID NO: 31 - DNA, 54 bp, Artificial Sequence
  Description of Artificial Sequence: Synthetic primer
  SGN000143 reverse primer
gtctcgtgggctcggagatgtgtataagagacagggcccctggagaggttttaa

SEQ ID NO: 32 - RNA, 135 nt, Artificial Sequence
  Description of Artificial Sequence: Synthetic polynucleotide
  SGN000930 sgRNA
gaacaacucaaauggaaaugaauaugucauaguuccaugaaagccaaaaguggcuuugauguuucuaugauaaggguuucggcccguggcgucggggaucgccugcccauuccgaugggcuucuccccauuuauu

SEQ ID NO: 33 - DNA, 25 bp, Homo sapiens
  SGN000930 target sequence
gaacaactcaaatggaaatgaatat

SEQ ID NO: 34 - DNA, 53 bp, Artificial Sequence
  Description of Artificial Sequence: Synthetic primer
  SGN000930 forward primer
tcgtcggcagcgtcagatgtgtataagagacaggacagccaagaggttttgcc

SEQ ID NO: 35 - DNA, 54 bp, Artificial Sequence
  Description of Artificial Sequence: Synthetic primer
  SGN000930 reverse primer
gtctcgtgggctcggagatgtgtataagagacagctgtcccttgcagcttctgt

SEQ ID NO: 36 - DNA, 431 bp, Artificial Sequence
  Description of Artificial Sequence: Synthetic polynucleotide
  SGN001022 promoter-guide RNA
agctccacggcaagagaattcaaagccgcgggcctgggttccacgcggggccccttacccaaggtgccccgggcgctcatttgcatgtcccacccaacaggtaaacctgacaggtcagtcgcggccgggtacggcctggcggtcagagcaccaaacgtacgagccttgtgatgcggttccattgcatgaaattctcctaaaggccccaagatgaacgggaaagcgcgcggttcgctcaccgtaactaaaacaggtgagagactcccgtgccttataaggcctgtggacggaggcagttgcgcatggcagtacattagagcagtcatagttccattaaagccaaaagtggctttgatgtttctatgataagggtttcgacccgtggcgtcggggatcgcctgcccattgaaatgggcttctccccatttatt

SEQ ID NO: 37 - DNA, 431 bp, Artificial Sequence
  Description of Artificial Sequence: Synthetic polynucleotide
  SGN001029 promoter-guide RNA
tgttctccgaacagtacttgtaatatacaggttccccgatccaccaccgtctgcgggtggcggtacagcctctcccagtgtgctttgcgctcatttgcatagagcacggcaccgaacgcagccactgtcccccgcgtccgctgtcccccgtgcaggccaaacccgggcgcggccccgccgacggtgggtacagagagtggtcggctcggcaccggctgctgcgcggcaccggcactcaccctgtccttatggagccctaactccatggctataaatatctaaggggaggaagggtagatcgcatggcagtacattagagcagtcatagttccattaaagccaaaagtggctttgatgtttctatgataagggtttcgacccgtggcgtcggggatcgcctgcccattgaaatgggcttctccccatttatt

SEQ ID NO: 38 - DNA, 431 bp, Artificial Sequence
  Description of Artificial Sequence: Synthetic polynucleotide
  SGN001018 promoter-guide RNA
agcgctccgcggagacttctgggacgcggcggctccgactccgccccgcttccggcttatttgcatacagcaattcctagcaggccctgtgctgaatttagtcggaaaactaccatgttcagtcgaaaaagcaaatacttttgtcagatatggccaaaaacttcacttgacttagccgtgtttcatgtaaagcattaaaaggatggagtgattgttcaaatttcataagaagaattcaccttcagtttaaggtggttcgctttctgcacttcaaataccgcggtggacagaccctgtttcgcatggcagtacattagagcagtcatagttccattaaagccaaaagtggctttgatgtttctatgataagggtttcgacccgtggcgtcggggatcgcctgcccattgaaatgggcttctccccatttatt

SEQ ID NO: 39 - DNA, 431 bp, Artificial Sequence
  Description of Artificial Sequence: Synthetic polynucleotide
  SGN001025 promoter-guide RNA
gcctgagtcgcgccgccgcctcccaaagacttctgggaaggcggtgcggctcaggctccgccccgcttccggggatatttgcatacgagcattcccagtaattcccagcagccactgtagctatatttggtagaataacgagcactttctgaactccagttaataactgcgttagttgcgttacacattggactaaaacaaatagaagttgaatctctagagcagtggagataagtcgccgtatgtgtacagaaattgcttccgggggctataaatagctggtagtggggctagaacgtcgcatggcagtacattagagcagtcatagttccattaaagccaaaagtggctttgatgtttctatgataagggtttcgacccgtggcgtcggggatcgcctgcccattgaaatgggcttctccccatttatt

SEQ ID NO: 40 - DNA, 431 bp, Artificial Sequence
  Description of Artificial Sequence: Synthetic polynucleotide
  SGN001037 promoter-guide RNA
cgcccgcgcagcgcagccgcttcccagagacttctgggacggcagcggctgcggctccgcccctcttccagtataatttgcatgcgaccatggattcccagcagccacctgagtcatatttggtggaacaaaaaccactttctcaatttcagtgaatgaccccatttggttaaggtattgttgcacaaatatcataaaagaagggacgaatggctgaaccggtttttaatggagttcgcccttagcgtaaaagagtttattctatgccctctaaatagttctgggatcaaccgtactactgcatggcagtacattagagcagtcatagttccattaaagccaaaagtggctttgatgtttctatgataagggtttcgacccgtggcgtcggggatcgcctgcccattgaaatgggcttctccccatttatt

SEQ ID NO: 41 - DNA, 431 bp, Artificial Sequence
  Description of Artificial Sequence: Synthetic polynucleotide
  SGN001819 promoter-guide RNA
agcgctccgcggagacttctgggacgcggcggctccgactccgccccgcttccggcttatttgcatacagcaattcctagcaggccctgtgctgaatttagtcggaaaactaccatgttcagtcgaaaaagcaaatacttttgtcagatatggccaaaaacttcacttgacttagccgtgtttcatgtaaagcattaaaaggatggagtgattgttcaaatttcataagaagaattcaccttcagtttaaggtggttcgctttctgcacttcaaataccgcggtggacagaccctgtttcgatattttctttaatggtgccaggcagtcatagttccattaaagccaaaagtggctttgatgtttctatgataagggtttcgacccgtggcgtcggggatcgcctgcccattgaaatgggcttctccccat

SEQ ID NO: 42 - DNA, 436 bp, Artificial Sequence
  Description of Artificial Sequence: Synthetic polynucleotide
  SGN001820 promoter-guide RNA
agcgctccgcggagacttctgggacgcggcggctccgactccgccccgcttccggcttatttgcatacagcaattcctagcaggccctgtgctgaatttagtcggaaaactaccatgttcagtcgaaaaagcaaatacttttgtcagatatggccaaaaacttcacttgacttagccgtgtttcatgtaaagcattaaaaggatggagtgattgttcaaatttcataagaagaattcaccttcagtttaaggtggttcgctttctgcacttcaaataccgcggtggacagaccctgtttcgatctggagggaacttacagcatatggtcatagttccatgaaagccaaaagtggctttgatgtttctatgataagggtttcggcccgtggcgtcggggatcgcctgcccattccgatgggcttctccccatttatt

SEQ ID NO: 43 - DNA, 431 bp, Artificial Sequence
  Description of Artificial Sequence: Synthetic polynucleotide
  SGN001821 promoter-guide RNA
agcgctccgcggagacttctgggacgcggcggctccgactccgccccgcttccggcttatttgcatacagcaattcctagcaggccctgtgctgaatttagtcggaaaactaccatgttcagtcgaaaaagcaaatacttttgtcagatatggccaaaaacttcacttgacttagccgtgtttcatgtaaagcattaaaaggatggagtgattgttcaaatttcataagaagaattcaccttcagtttaaggtggttcgctttctgcacttcaaataccgcggtggacagaccctgtttcgcacatctcgagcaagacgttgtcatagttccattaaagccaaaagtggctttgatgtttctatgataagggtttcgacccgtggcgtcggggatcgcctgcccattgaaatgggcttctccccatttatt

SEQ ID NO: 44 - DNA, 431 bp, Artificial Sequence
  Description of Artificial Sequence: Synthetic polynucleotide
  SGN001822 promoter-guide RNA
agcgctccgcggagacttctgggacgcggcggctccgactccgccccgcttccggcttatttgcatacagcaattcctagcaggccctgtgctgaatttagtcggaaaactaccatgttcagtcgaaaaagcaaatacttttgtcagatatggccaaaaacttcacttgacttagccgtgtttcatgtaaagcattaaaaggatggagtgattgttcaaatttcataagaagaattcaccttcagtttaaggtggttcgctttctgcacttcaaataccgcggtggacagaccctgtttcgcttctatagcctccttccccgtcatagttccattaaagccaaaagtggctttgatgtttctatgataagggtttcgacccgtggcgtcggggatcgcctgcccattgaaatgggcttctccccatttatt

SEQ ID NO: 45 - DNA, 436 bp, Artificial Sequence
  Description of Artificial Sequence: Synthetic polynucleotide
  SGN001823 promoter-guide RNA
agcgctccgcggagacttctgggacgcggcggctccgactccgccccgcttccggcttatttgcatacagcaattcctagcaggccctgtgctgaatttagtcggaaaactaccatgttcagtcgaaaaagcaaatacttttgtcagatatggccaaaaacttcacttgacttagccgtgtttcatgtaaagcattaaaaggatggagtgattgttcaaatttcataagaagaattcaccttcagtttaaggtggttcgctttctgcacttcaaataccgcggtggacagaccctgtttcggaacaactcaaatggaaatgaatatgtcatagttccatgaaagccaaaagtggctttgatgtttctatgataagggtttcggcccgtggcgtcggggatcgcctgcccattccgatgggcttctccccatttatt

SEQ ID NO: 46 - DNA, 242 bp, Artificial Sequence
  Description of Artificial Sequence: Synthetic polynucleotide
  SGN001828 promoter-guide RNA
ggctccgactccgccccgcttccggcttatttgcatacagcaatattcaccttcagtttaaggtggttcgctttctgcacttcaaataccgcggtggacagaccctgtttcgatattttctttaatggtgccaggcagtcatagttccattaaagccaaaagtggctttgatgtttctatgataagggtttcgacccgtggcgtcggggatcgcctgcccattgaaatgggcttctccccat

SEQ ID NO: 47 - DNA, 247 bp, Artificial Sequence
  Description of Artificial Sequence: Synthetic polynucleotide
  SGN001829 promoter-guide RNA
ggctccgactccgccccgcttccggcttatttgcatacagcaatattcaccttcagtttaaggtggttcgctttctgcacttcaaataccgcggtggacagaccctgtttcgatctggagggaacttacagcatatggtcatagttccatgaaagccaaaagtggctttgatgtttctatgataagggtttcggcccgtggcgtcggggatcgcctgcccattccgatgggcttctccccatttatt

SEQ ID NO: 48 - DNA, 242 bp, Artificial Sequence
  Description of Artificial Sequence: Synthetic polynucleotide
  SGN001830 promoter-guide RNA
ggctccgactccgccccgcttccggcttatttgcatacagcaatattcaccttcagtttaaggtggttcgctttctgcacttcaaataccgcggtggacagaccctgtttcgcacatctcgagcaagacgttgtcatagttccattaaagccaaaagtggctttgatgtttctatgataagggtttcgacccgtggcgtcggggatcgcctgcccattgaaatgggcttctccccatttatt

SEQ ID NO: 49 - DNA, 242 bp, Artificial Sequence
  Description of Artificial Sequence: Synthetic polynucleotide
  SGN001831 promoter-guide RNA
ggctccgactccgccccgcttccggcttatttgcatacagcaatattcaccttcagtttaaggtggttcgctttctgcacttcaaataccgcggtggacagaccctgtttcgcttctatagcctccttccccgtcatagttccattaaagccaaaagtggctttgatgtttctatgataagggtttcgacccgtggcgtcggggatcgcctgcccattgaaatgggcttctccccatttatt

SEQ ID NO: 50 - DNA, 247 bp, Artificial Sequence
  Description of Artificial Sequence: Synthetic polynucleotide
  SGN001832 promoter-guide RNA
ggctccgactccgccccgcttccggcttatttgcatacagcaatattcaccttcagtttaaggtggttcgctttctgcacttcaaataccgcggtggacagaccctgtttcggaacaactcaaatggaaatgaatatgtcatagttccatgaaagccaaaagtggctttgatgtttctatgataagggtttcggcccgtggcgtcggggatcgcctgcccattccgatgggcttctccccatttatt

SEQ ID NO: 51 - DNA, 242 bp, Artificial Sequence
  Description of Artificial Sequence: Synthetic polynucleotide
  SGN001833 promoter-guide RNA
ggctccgactccgccccgcttccggcttatttgcatacagcaatattcaccttcagtttaaggtggttcgctttctgcacttcaaataccgcggtggacagaccctgtttcgcatggcagtacattagagcagtcatagttccattaaagccaaaagtggctttgatgtttctatgataagggtttcgacccgtggcgtcggggatcgcctgcccattgaaatgggcttctccccatttatt

SEQ ID NO: 52 - protein, 1072 aa, Bacillus sp.
  APG08290.1 RNA-guided nuclease
MSELDYRIGLDIGTNSIGWGVIELFWNKDRERYEKVRIVDKGVRMFDKAEIPNKGASLAEPRRIARSSRRRLNRKSQRKKEIRNLLVQHGMITQEELDLLYPLSKKSIDIWDIRLDGLDRLLNHLEWARLLIHLAQRRGFKSNRKSELKDAETGKVLSSIQVNEKRLFLYRTVGEMWIKDAEFSKYDRRRNSPNEYVFSVSRADLEKEIVTLFEAQRKFQSSYASKNLQETYLQIWAHQLPFASGNAILNKVGYCSLLKGKERRIPKATYTFQYFSALDQVNRTRLGPDFQPFTQEQKEIILDKMFQRTDYYKKKTIPEVSYYDIRKWLELDETIQFKGLNYDPNEELKKIEKKPFINLKAFYEIKKVVANYAERTNEAFSTLDYDAIAYALTVYKTDKDIRSYLKKSNNLSKRCYDDQLIEELFTLSYTKFGHLSFKAINHVLPIMQEGRTYQEAIHQLGYDTTNLKKENRSMFLPLIPDEITNPIVKRAITQARKVVNAIIRRYGSPNSVHIELARELSKSHDERKKIMTAHDENYKKNKGAISILIENGILNPTGYDIVRYKLWKEQGERCAYSLKEIPPDTFFNELKKERNGSPILEVDHILPYSQSFIDSYHNKVLVYSDENRNKGNRIPYTYFLETNKDWEAFERYVRSNKLFSKKKREYLLKKTYLPRESELIKERHLNDTRYASTFLKNFIEQNLQFKEVEVNLRKKRVQTVNGVITAHLRKRWGLEKNRQETYLHHAMDAIIVACTDHHMVTRITEYYQIKESNKSVKKPYFPMPWEGFRDELLSHLASQPIAKKISEELKAGYQSSDYIFVSRMPKRSVTGAAHDQTIRRKGGIDKKGKTIIIKRVRLKDIKFDENGDFKMVGKEQDLATYEAIKQRYLEHRKNSKKAFETPLYKPSKKGTGNLIKRVKIEGQTKAFVREVNGGVAQNSDLVRVDLFEKDDKYYMVPIYVPDTVCSELPKKVVKSGKGYEQWLTLDNSFTFKSSLYPYDLVRLVKGNEDRFLYFGTLDIDSDRLNFKDVNKPSKQNEYRYSLKTIENLEKYEVGVLGDLRLVKQETRRIFNR

SEQ ID NO: 53 - protein, 1071 aa, Bacillus sp.
  APG07433.1 RNA-guided nuclease
MRELDYRIGLDIGTNSIGWGVIELSWNKDRERYEKVRIVDQGVRMFDRAEMPKTGASLAEPRRIARSSRRRLNRKSQRKKNIRNLLVQHGVITQEELDSLYPLSKKSMDIWGIRLDGLDRLLNHFEWARLLIHLAQRRGFKSNRKSELKDTETGKVLSSIQLNEKRLSLYRTVGEMWMKDPDFSKYDRKRNSPNEYVFSVSRAELEKEIVTLFAAQRRFQSPYASKDLQETYLQIWTHQLPFASGNAILNKVGYCSLLKGKERRIPKATYTFQYFSALDQVNRTRLGPDFQPFTKEQREIILNNMFQRTDYYKKKTIPEVTYYDIRKWLELDETIQFKGLNYDPNEELKKIEKKPFINLKAFYEINKVVANYSERTNETFSTLDYDGIGYALTVYKTDKDIRSYLKSSHNLPKRCYDDQLIEELLSLSYTKFGHLSLKAINHVLSIMQKGNTYKEAVDQLGYDTSGLKKEKRSKFLPPISDEITNPIVKRALTQARKVVNAIIRRHGSPHSVHIELARELSKNHDERTKIVSAQDENYKKNKGAISILSEHGILNPTGYDIVRYKLWKEQGERCAYSLKEIPADTFFNELKKERNGAPILEVDHILPYSQSFIDSYHNKVLVYSDENRKKGNRIPYTYFLETNKDWEAFERYVRSNKFFSKKKREYLLKRAYLPRESELIKERHLNDTRYASTFLKNFIEQNLQFKEAEDNPRKRRVQTVNGVITAHFRKRWGLEKDRQETYLHHAMDAIIVACTDHHMVTRVTEYYQIKESNKSVKKPYFPMPWEGFRDELLSHLASQPIAKKISEELKAGYQSLDYIFVSRMPKRSITGAAHKQTIMRKGGIDKKGKTIIIERLHLKDIKFDENGDFKMVGKEQDMATYEAIKQRYLEHGKNSKKAFETPLYKPSKKGTGNLIKRVKVEGQAKSFVREVNGGVAQNGDLVRVDLFEKDDKYYMVPIYVPDTVCSELPKKVVASSKGYEQWLTLDNSFTFKFSLYPYDLVRLVKGDEDRFLYFGTLDIDSDRLNFKDVNKPSKKNEYRYSLKTIEDLEKYEVGVLGDLRLVRKETRRNFH

SEQ ID NO: 54 - DNA, 7 bp, Artificial Sequence
  Description of Artificial Sequence: Synthetic oligonucleotide
  TATA-box consensus
tatawaw

SEQ ID NO: 55 - DNA, 5 bp, Artificial Sequence
  Description of Artificial Sequence: Synthetic oligonucleotide
  TATA-box
tataa

SEQ ID NO: 56 - DNA, 8 bp, Artificial Sequence
  Description of Artificial Sequence: Synthetic oligonucleotide
  OCT sequence
atttgcat

SEQ ID NO: 57 - DNA, 17 bp, Artificial Sequence
  Description of Artificial Sequence: Synthetic oligonucleotide
  SPH consensus
ctccgccccgcttccgg

SEQ ID NO: 58 - protein, 82 aa, Artificial Sequence
  Description of Artificial Sequence: Synthetic polypeptide
  UGI
TNLSDHEKETGKQLVIQESILMLPEEVEEVIGNKPESDILVHTAYDESTDENVMLLTSDAPEYKPWALVIQDSNGENKIKML

SEQ ID NO: 59 - protein, 116 aa, Artificial Sequence
  Description of Artificial Sequence: Synthetic polypeptide
  USP2
MKTTTQELKQYITRLFQLSNNETWECEALEEAAENILPERFINNSLLAHLTLNTYTYYNDELHELSIYPFLMYANDQLISIGYLDHFDMDFLYLTDTKNTIIDERHLLKQGENNHE

SEQ ID NO: 60 - protein, 7 aa, Artificial Sequence
  Description of Artificial Sequence: Synthetic peptide
  SV40 Nuclear Localization Signal
PKKKRKV

SEQ ID NO: 61 - protein, 16 aa, Artificial Sequence
  Description of Artificial Sequence: Synthetic peptide
  Nucleoplasmin Nuclear Localization Signal
KRPAATKKAGQAKKKK

SEQ ID NO: 62 - protein, 1070 aa, Bacillus sp.
  APG05083.1
MRELDYRIGLDIGTNSIGWGIIELSWNKDREQYEKARIVDKGVRMFDKAEIPKTGASLAEPRRIARSSRRRLNRKSQRKKDIRNLLVQHEIISQKELASLYPLTKSSMDIWDIRLDGLDRLLDRFEWTRLLIHLAQRRGFKSNRKSELKDVETGKVLSSIQANEKRLSLYRTVGEMWMKNEDFSKYDKRRNSSNEYVFSVSRADLEKEIVTLFEAQRKFQSSYASADLQKTYLQIWAHQLPFASGNAIVNKVGYCSLLKGKEKRVPKATYTFQYFSTLDQINRTRLGPNFQPFTKEQRDVILDEMFNRTDYYKKKTIPEVTYYDIRKWLALDETIQFKGLTYDPNEELKKIELKSFINLKPFYEIKKVVTNYAKKTNEAFSTLDYDTFAYALTVYKTDKDIRSYLKKSNNLSKCCYDDQLIEELLTLSYTKFGHLSFKAINHVLPIMQEGRTYQEAIHQLGYDATNLKKENRSMFLPLFPDEITNPIVKRALTQARKVVNAIIRRYGSPNSVHIELARELSKSHDERTKIMKAHDENYKKNKGAISILIENGILNPTGYDIVRYKLWKEQGERCAYSLKQIPANTFFNEMKKERSGSPVLEIDHILPYSQSFIDSYHNKVLVYGDENQKKGNRIPYTYFLEGNKDWESFESYVRLNSFFSKKKRGYLLKKAYLPRESNMIKERHLNDTRYASSYLKNFIEKNLKFKEVEGSTRKKHVQTVNGIITAHLRKRWGLEKDRQETYLHHAMDAIIVACTDHHMVTKVTEYYQIKESNKSIRKPYFPLPWVGFREEILSHLARQPIARKISEELKIGYQSFDYILVSRMPKRSVTGAAHEQTIMKKGGIDKKGKTIIIKRVYLKDIKFDENGDFKMVGKEQDLATYEAIKQRYIEYGKESKKAFETPLYKPSKKGKGNLIKKIKVEVQTKSFVREVNGGVAQNGDLVRVDLFEKDNRYYMIPIYVMDTVHSELPNKAVTSSKGYEQWLTIDNSFTFKFSLYPYDLVRLVKGNEDRFLYFSTLDINSDRLNFKDVNKPSKQAENRYSLKTIENLEKYEVGVLGDLRFVRQEIRKNF

SEQ ID NO: 63 - RNA, 19 nt, Bacillus sp.
  APG05083.1 crRNA repeat
gucauaguuccauuauugc

SEQ ID NO: 64 - RNA, 84 nt, Bacillus sp.
  APG05083.1 tracrRNA
gcuuugauguuucuaugauaagggcuuaggcccguggcguuggggaucgccugcccauuuuaaugggcuucuccccaucuauuu

SEQ ID NO: 65 - DNA, 6 bp, Artificial Sequence
  Description of Artificial Sequence: Synthetic oligonucleotide
  APG05083.1, APG07433.1, and APG07513.1 PAM
  modified_base (1)..(4): a, c, t, g, unknown or other
nnnncc

SEQ ID NO: 66 - RNA, 21 nt, Bacillus sp.
  APG07433.1 crRNA repeat sequence
gucauaguuccauuaaagcca

SEQ ID NO: 67 - RNA, 85 nt, Bacillus sp.
  APG07433.1 tracrRNA
uggcuuugauguuucuaugauaaggguuucgacccguggcgucggggaucgccugcccauugaaaugggcuucuccccauuuauu

SEQ ID NO: 68 - protein, 1071 aa, Bacillus sp.
  APG07513.1
MRELDYRIGLDIGTNSIGWGVIELSWNKDREQYEKTRIVDKGVRMFDKAEIPKTGASLAEPRRIARSSRRRLNRKSQRKKDIRNLLVQHEIISQKELTSLYPLSKSSMDIWDIRLDGLDRLLDRFEWARLLIHLAQRRGFKSNRKSELKDVETGKVLSSIQVNEKRLSLYRTVGEMWMKNADCSKYGKRRNSPNEYVFSVSRADLEKEIVTLFEAQRKFHSSYASVDLQKTYIQIWAHQLPFASGNAIVNKVGYCSLLKGKEKRVPKATYTFQYFNTLDQINRTRLGPNFQPFTKEQRDIILDKMFQRTDYYKKKTIPEVTYYDIRKWLALDETIQFKGLTYDPNEELKKIEMKPFINLKPFYEIKKVVTNYAKKTNEVFSALDYDTVAYALTVYKTDKDIRSYLKRSNNLSKRCYDDQLIEELLTLSYTKFGHLSFKAINHVLPIMQEGRTYQEAIHQLGYDTTNLKKENRSMFLPIIPDEITNPIVKRALTQARKVVNAIIRRYGSPNSVHIELARELSKSHDERKKIMTAHDENYKKNKGAVSILIDNGILNPTGYDIVRYKLWKEQGERCAYSLKKIPANTFFNELKKERSGPPVLEVDHILPYSQSFIDSYHNKVLVYGDENQKKGNRIPYTFFSEEDKEWESFESYVRSNSFFSKKKRGYLLKKAYLPRESNLIKERHLNDTRYASSYLKNFIEKNLKFKEAVGITRKKYVQTVNGVITAHLRKRWGLEKDRQETYLHHAMDAIIVACTDHHMVTKVTEYYQIKEGNKSIKKPYFPLPWMGFREEILSHLESQPIARKISEELKIGYQSPDYILVSRMPKRSVTGSAHDQTVMKKGDIDKKGKTIIIKRVHLKDIKFDENGDFKMVGKEQDLATYEAIKQRYLEYRKESKKAFETPLYKPSKKGKGNLIKKIKVEVQTKSFVREINGGVAQNGDLVRVDLFEKDNRYYMVPIYVVDTVRSELPNKAVTSSKGYEQWLSIDNSFTFKFSLYPYDLVRLVKGDEDRFLYFSTLDINSDRLNFKDVNKPSKQAEYRYSLKTIENLEKYEIGVLGDLRLVRQETRKIFK

SEQ ID NO: 69 - RNA, 27 nt, Bacillus sp.
  APG07513.1 crRNA repeat sequence
gucauaguuccauuaaagccauugcug

SEQ ID NO: 70 - RNA, 93 nt, Bacillus sp.
  APG07513.1 tracrRNA
acagcaauggcuuugauguuucuaugauaagggcuucggcccguggcguuggggaucgccugcccauuuuaaugggcuucuccccaucuauuu

SEQ ID NO: 71 - RNA, 21 nt, Bacillus sp.
  APG08290.1 crRNA repeat sequence
gucauaguuccaugaaagcca

SEQ ID NO: 72 - RNA, 85 nt, Bacillus sp.
  APG08290.1 tracrRNA
uggcuuugauguuucuaugauaaggguuucggcccguggcgucggggaucgccugcccauuccgaugggcuucuccccauuuauu

SEQ ID NO: 73 - DNA, 6 bp, Artificial Sequence
  Description of Artificial Sequence: Synthetic oligonucleotide
  APG08290.1 PAM
  modified_base (1)..(2): a, c, t, g, unknown or other
  modified_base (4)..(4): a, c, t, g, unknown or other
nnrncc

SEQ ID NO: 74 - protein, 1337 aa, Enterococcus sp.
  APG05459.1
MKKDYVIGLDIGTNSVGWAVMTEDYQLVKKKMPIYGNTEKKKIKKNFWGVRLFEEGHTAEDRRLKRTARRRISRRRNRLRYLQAFFEEAMTALDENFFARLQESFLVPEDKKWHRHPIFAKLEDEVAYHETYPTIYHLRKKLADSSEQADLRLIYLALAHIVKYRGHFLIEGKLSTENISVKEQFQQFMIIYNQTFVNGESRLVSAPLPESVLIEEELTEKASRTKKSEKVLQQFPQEKANGLFGQFLKLMVGNKADFKKVFGLEEEAKITYASESYEEDLEGILAKVGDEYSDVFLAAKNVYDAVELSTILADSDKKSHAKLSSSMIVRFTEHQEDLKKFKRFIRENCPDEYDNLFKNEQKDGYAGYIAHAGKVSQLKFYQYVKKIIQDIAGAEYFLEKIAQENFLRKQRTFDNGVIPHQIHLAELQAIIHRQAAYYPFLKENQEKIEQLVTFRIPYYVGPLSKGDASTFAWLKRQSEEPIRPWNLQETVDLDQSATAFIERMTNFDTYLPSEKVLPKHSLLYEKFMVFNELTKISYTDDRGIKANFSGKEKEKIFDYLFKTRRKVKKKDIIQFYRNEYNTEIVTLSGLEEDQFNASFSTYQDLLKCGLTRAELDHPDNAEKLEDIIKILTIFEDRQRIRTQLSTFKGQFSAEVLKKLERKHYTGWGRLSKKLINGIYDKESGKTILDYLIKDDGVSKHYNRNFMQLINDSQLSFKNAIQKAQSSEHEETLSETVNELAGSPAIKKGIYQSLKIVDELVAIMGYAPKRIVVEMARENQTTSTGKRRSIQRLKIVEKAMAEIGSNLLKEQPTTNEQLRDTRLFLYYMQNGKDMYTGDELSLHRLSHYDIDHIIPQSFMKDDSLDNLVLVGSTENRGKSDDVPSKEVVKDMKAYWEKLYAAGLISQRKFQRLTKGEQGGLTLEDKAHFIQRQLVETRQITKNVAGILDQRYNANSKEKKVQIITLKASLTSQFRSIFGLYKVREVNDYHHGQDAYLNCVVATTLLKVYPNLAPEFVYGEYPKFQAFKENKATAKTIIYTNLMRFFTEDEPRFMKDGEILWSNSYLKNIKKELNYHQMNIVKKVEVQKGGFSKESIKPKGPSNKLIPVKNGLDPQKYGGFDSPVVAYTVLFTHEKGKKPLIKQEILGITIMEKTRFEQNPILFLEEKGFLRPRVLMKLPKYTLYEFPEGRRRLLASAKEAQKGNQMVLPEHLLTLLYHAKQCLLPNQSESLAYVEQHQPEFQEILERVVDFAEVHTLAKSKVQQIVKLFEANQTADVKEIAASFIQLMQFNAMGAPSTFKFFQKDIERARYTSIKEIFDATIIYQSTTGLYETRRKVVD

SEQ ID NO: 75 - RNA, 16 nt, Enterococcus sp.
  APG05459.1 crRNA repeat sequence
guuuuagagucauguu

SEQ ID NO: 76 - RNA, 74 nt, Enterococcus sp.
  APG05459.1 tracrRNA
aacauagcaaguuaaaauaagguuuuaaccguaaucaacuguaaaguggcgcuguuucggcgcuuuuuuuguuu

SEQ ID NO: 77 - DNA, 3 bp, Artificial Sequence
  Description of Artificial Sequence: Synthetic oligonucleotide
  APG05459.1 PAM
  modified_base (1)..(1): a, c, t, g, unknown or other
ngg

SEQ ID NO: 78 - protein, 1436 aa, Enterococcus sp.
  APG04583.1
MAKNILGLDLGTNSIGWALVQQDFENKEGNILGMGSRIIPMSQDILGEFGKGNSISQTAERTGYRGVRRLRERHLLRRERLHRVLHLLGFLPKHYDEKIDFTQRFGKFINQAEPKLAFDSEFLFKDSFHEMLADFKQNQPEFLKDKNGEDCLVPYDWTIYYLRKKALTQKIEKYELAWLILNFNQKRGYYQLRGEEEKENPNKLVGFHSLKIVDVIPDAETNKKGETWYSLHLENGWVYRRSSKISLADWKDKVRDFIVTTDLNDDGSEKLDKDGIVKRSFRAPSADDWTLLKKKTEKDIDNSNKTVGTYIYDNLLLNPKQKIKGKMVRTIERKFYKQELEQILKTQKEFHSELQSENLLQDCVRELYRNNEQHQQMLEAKDFVHLFLNDIIFYQRPLRSQKSSISNCTLEFRKSKNENGEEVIHRLKVIAKSNPYYQEFRLLQWVQNLAIYTKDDDKNVTNEFLKSTQDWEDLLRWLHSKKEIKQDALIKFLIEKKGLKGKALTIEVAKYRWNYVQDKDYPGNETRYLIQSRLDKVEYAPKDFLTYENEMALWHIIYSINDKIEYEKALKSFANKKGLDEVTFVEAFKKFPPFKSDYGSFSEKAIKKLLPLMRFGTQWNWDNIDQNSKERIGKILTGEYDENIKGRVREKARHLNSETDFQALPLWLAQYVVYGRHSEADIAGKWNSVDDLKQFLDDFKQHSLRNPIVEQVITETLRAVKDIWNFYGKGAKDFFSEIHIELGREMKNTADERKRITTMVTDNENTNLRIKALLAEMALDQNVDNVRPYSPMQQEILKIYEEGVLNAEENIDDDILKISKTAQPSATDLKRYKLWLEQKYRSPYTGQMIPLNKLFTPEYEIEHIIPQSRYFDDSMSNKVICEAAVNKLKDNQIGLVFIKNHHGEVVDFGMGKQVKILEVSDYEDFVKQNYNKNRGKRNKLLLEDIPEKMIERQLNDTRYISKYITQVLSNIVRDDKEGSKDDGVNSKNIVPGNGKITTRLKQDWGLNDVWNDLVLPRFERMNTLTNSNDFTSKNTHGKTIPTVPIELSKGFSKKRIDHRHHAMDALVIACATRDHVNLLNNESSKSDTKRYDLNRKLRKYEKVAYNDPKTGERIEKEVPKDFIKPWETFTEDTRTLLENIVISFKQNLRVINKATNYYEKIENGKKVKVEQKGINWAVRKALHKETVSGQVHLDRIKVAKGKILTATRKTLDASFNEKTIESITDTGIQKILLNYLKSKDNNPEVAFSPEGIEELNKNIRLYNDGKAHQPILKVRVFEQGSKFTLGETGNKTTKFVEAAKGTNLFFGIYEDKSGKRSYETIPLNIVIERQKQGLQAVPETNEKGKQLLFTLSPNDLVYVPEEGVFDENNIKVDRIYKVVSFSTYQCFFVRNDVSTSVVNKVEYSALNKMEKSIDNIMIKENCVKLNVDRLGKISKA

SEQ ID NO: 79 - RNA, 16 nt, Enterococcus sp.
  APG04583.1 crRNA repeat sequence
guugugaguuccuuuc

SEQ ID NO: 80 - RNA, 78 nt, Enterococcus sp.
  APG04583.1 tracrRNA
gaaaggaacucacaauaaggauuauuccguugugaaaacauuuagcgccucgacuaucuucggggcuuuuuuauuuuu

SEQ ID NO: 81 - DNA, 7 bp, Artificial Sequence
  Description of Artificial Sequence: Synthetic oligonucleotide
  APG04583.1 PAM
  modified_base (1)..(2): a, c, t, g, unknown or other
nnraaty

SEQ ID NO: 82 - protein, 1456 aa, Empedobacter sp.
  APG01688.1
MMIKNILGLDLGTNSIGWALIKQDFENKHGEILGMGSRIIPMSQDILGDFGKGNSISQTADRTKYRSVRRLRERFLLRRERLHRVLHLLNFLPQHYASQIDFEKKFGKFKSETEPKLAWENWGGKFSFLFQNSFNEMLEDFKAAGQGLKIPYDWTIYYLRKKALSQKIEKEELAWILLNFNQKRGYYQLRGEEEEENPNKLVEFYSLKIVDVVADEPQKGKSDIWYSLILENGWVYRRASKIPLFDWKDKTRDFIVTTDLNDDRSVKTDKEGNEKRSFRAPSENDWTLVKKKTEQEIDQSHKTVGTYIYETLLLNPKQKIKGKLVRTIERKFYKDELKQILEKQKEFHQELKNDDLYNDCIRELYRNNEAHQLTLSKKDFVHLLMDDLIFYQRPLRSQKSSISNCTLEFRKYKDENGIEHTQYLKAIPKSNPYYQEFRLWQWMYNLNIYRKDDEANVTKEFLNTNKDFESLFEFLNNRKEIEQKPLIKFLLEQKDINKKLLNAEAEKYRWNYVEDKKYPCNETKTMISSRLDKVENISDDFLTRDIEQKIWHIIYSVNDKIEYEKALKSFATRNDLDENSFIEAFKKFSPFKSEYGSFSEKAIKKLLPLMRLGKYWYEDEIVKHSDIYFKNIENLLGDFSNRDKKISEEDKEKWNKSINLKLQEELKDFQTAEIDLFQGLRLHIAQYLVYGRHSEASMIGKWNSAEDLEEFLKDFKQHSLRNPIVEQVITETLRVVKDIWLKYGNGAKDFFNEIHIELGREMKLPADDRKKLTNQISENENTNFRIKALLAEMMNDSSVENVRPFSPMQQEILKIYEDDVLKSDIEIEDDILKISKTAQPSPSDLKRYKLWLEQKYKSPYTGQIIPLNKLFTPEYEIEHIIPQSRYFDDSFSNKVICESAVNKLKDNYIGLEFIKQFGGTIIELGFGKSIKVFETKEYEDFVKKHYANNQGKRNKLLMEDIPEKMIERQMNDTRYISKYISGVLSNIVRVEDGSDEGVNSKNIVPGNGKITTQLKQDWGLNDVWNDLILPRFERMNQLTNSKVFTAWNENYQKFLPTVPIEYSKGFSKKRIDHRHHALDALVIACATKDHVNLLNNQSAKSDTKRYDLKKKSMKFEKVVYNDAKTGEKIEREVPKQFLKPWENFTLDVKHNLETIIVSFKQNLRVINKATNYYEKYVEKDGTKNKERVEQTGTNWAIRKPMHKDTVSGKVDLPWVKVPKGKILTATRKSLDSSFDLKSIGSITDTGIQKILKNYLAFKDGNPELAFSPEGIDDLNKNIEKYNDGKPHQPINKVRVFELGSKFQVGQSGNKKDKYVEAAKGTNLFFAVYEDEKGKRNYETIPLNEVIERQKQGLSVVDLKGTNDFYLCPNDFVYIPSGDELENINNVDFKDIKKEINERIYKVVSFTGNRLSCIPYMVATTIVNKLEFTQLNKIEFTKEKEICIKLNVDRLGNISKA

SEQ ID NO: 83 - RNA, 18 nt, Empedobacter sp.
  APG01688.1 crRNA repeat
guugugaauugcuuucaa

SEQ ID NO: 84 - RNA, 75 nt, Empedobacter sp.
  APG01688.1 tracrRNA
uugaaaagcaauucacaauaaggauuauuccguugugaaaacauucaaggcggggcaacucgucuuuuuucuuuu

SEQ ID NO: 85 - DNA, 6 bp, Artificial Sequence
  Description of Artificial Sequence: Synthetic oligonucleotide
  APG01688.1 PAM
  modified_base (1)..(2): a, c, t, g, unknown or other
  modified_base (4)..(5): a, c, t, g, unknown or other
nnrnnc

SEQ ID NO: 86 - protein, 1060 aa, Bacillus sp.
  APG00969
MKQTSYSLGLDIGIASVGYGLIDNDENIVDAGVRLFPEANSKNNDGRRKSRGSKRLIRRKRHRIARVKHLLKESGIDVSYENTVLTNPYEIRCKGLTLPLTNHELSIALLHLAKRRGVHNVKSMDQEKVKGNELSTKEQLTINDNLLEEKFICELQLERLNKEGIVRSHSNRFKTADYIKEIKNLLETQAKQNTLVTEEFIEKYIEIFSGRRKYYEGPGGESKYGWKGDIEKWYEGLMGKCTYFPKELRCVKHAYSAALFNLLNDLNNLSINREEDTKLSQYEKEQIIEKIFKVRKTPTLTQIAKLLKVDPTNIKGFRTKANGTPDFLSIKIYHDLKGIIDDKQLLDDIAFLDNVAQILTVWQDSQSIQEKLKTLNKNLDDKTIKEISELKKYTQTHSLSLKLINVLLPELWETTKNQMTILSELKLKPRKIDLHNCNEIPVNMINDLIVSPVVRRSLTQSIEMINQIIKDYGHPREIVIELAREKNSEEKKNFIKSLNEKNKQINDEVIEKLNASNHRDNKGMFNKVKLWILQDGHCLYSLKPIRLEDLLNNPNHYEIDHIIPKSVSFDDSMSNKVLVYQIENSKKGNRTPYQYLTSADKTITYEKFKANITQLAKSNHKISKKKLDYLLEERDINRFHIKKEFINRNLVDTRYATRSLINLLKYYFSEKDINVKVKSINGSFTDYLRKLWNFPKDREFYHKHHAEDALIIAMANKIFTTRKIFKEQNSVFSDEQILDGEVTNILSDDQFQAEFTEKFYKVQAIKKYDKYKYSHRVDKKPNRQLFDDTLYSTREFEGEEYYIGKIKDIYNLKDKRLKKIFTKSPEKILMYQHDSQTFKKLKQIMRSYEDEVNPLAKYHKETGEYLRKECKKGNGPIVKSLKYRVTKLGVHKDITHKYENSKNKVVILSLKPFRMDVFKENGVYKFITIRYCDLKETVNSYTISEHLYKAKLKAKDIKSMDSFKWSFYKNDLLEYNGELCTFKGVNDDKKNKIEVNWVEKNFAIYAEKKNLKSKQLVKSITKSTVKSLLKYTTDILGNRYPVRNEKLKLMIRKQTFRGDL

SEQ ID NO: 87 - RNA, 16 nt, Bacillus sp.
  APG00969 crRNA repeat
guuuuaguacucugug

SEQ ID NO: 88 - RNA, 73 nt, Bacillus sp.
  APG00969 tracrRNA
cacagaaucuacuaaaauaaggcauaaugccguauuuaaucccaucauaauucugaugggauuuuuuauauuu

SEQ ID NO: 89 - DNA, 5 bp, Artificial Sequence
  Description of Artificial Sequence: Synthetic oligonucleotide
  APG00969 PAM
  modified_base (1)..(2): a, c, t, g, unknown or other
nnarv

SEQ ID NO: 90 - protein, 1090 aa, Rhizobium sp.
  APG03128
MNNLLYSFDIGTNSIGWCVFALDEVGDPCRIVDLGARIYADGRDPQTKTSLAVARREARAMSRRRDRSLRRRKATLRTMIEYGLMPAHKVEQETLLRKTGDREGGDEGFNPYALRARALGEKLPPFYIGRALFHLGQRRGFKSNRKTDRKDNDKGKIALGIDELRAAMHRSGSPTLGAWLAMRRADGHPVRLRAGSEVFDAEGYAFYPERSLLEDEFRQIWTAQAVHHPQLLTSERRAHLFRVMFYQRPLKKPLVGRCSFNPAEARLSRAHPLFQEFRLYKEVNDLEVVLPDQSHRKLTLDERNALVAKLKSSRKASFSVLRRTLKLTPDLAFNKESEARKDLLGDEINSALADAKMFGVRWGGFPRARQWEIITHLKEEENPARLSDWLKSEFGLDDERVVAIANIALPEGYGRLGETALASMLEEMKTAVIPESEAAKRCGYDHSNLAKEQDEGLDILPEYQEILERHIPPGTGDPDDIYDIRKGRITNPTVHIGLNQLRRVVNALIKRHGKPRHIVVELARDLQLSEKQKADVNRRIAKNTREAEGRSQKLIEMGQLDTGYNRLLLKLWEELNQDKPEDRVCIYSGKPIGIAMLFSGEVDIDHILPWSKTLDDSQANKLLCLKSANRQKRNRTPSDVPEWRDCYEEVLARAARLPKNKRWRFAADAMQQFEAEGGFLARQLTDTQYLSRMAFEYLSALFPSEEADKWGELRQRKRVHVVPGRLTELLRRNWGLNTLLPDHNLGEMAQEKNRKDHRHHAIDAAVIGVTSRSLLQRMSGAAARLDDVAFDDLVRTVVKDNPPWPGFREELLGCINRVTVSHKPDHGTVSRAAYAQGKGQTAGKLHNDTAYGITGLQDMKGSPLVVRRKPFMALEVKDIASIRDTELQSALYDAIGSLTEKKALQEALVRFRDRHPQFKGIRRVRVLEALSVIPIVDNNGKAYKGYKGDANYRYEVWETLDGRWHTEVVSMFDAHQPGWQSPFHRQHPAARRVLKLQQNDMVAYEHPADGYTIARVVKFSNDKRIYFASHRESGSLKARDADKGDPFTYFAKANNGLRDIKCRQVRIDAAGRVFDPGPQDREARQSKGRA

SEQ ID NO: 91 - RNA, 31 nt, Rhizobium sp.
  APG03128 crRNA repeat
gguugcggcuggaccgcguuuucugaucugc

SEQ ID NO: 92 - RNA, 79 nt, Rhizobium sp.
  APG03128 tracrRNA
gcaaaucagaaaacgcggucuggccguuaacaagccucgaccagcaccagauaaggcggucccuccgggggccguuuuu

SEQ ID NO: 93 - DNA, 7 bp, Artificial Sequence
  Description of Artificial Sequence: Synthetic oligonucleotide
  APG03128 PAM
  modified_base (1)..(2): a, c, t, g, unknown or other
  modified_base (5)..(6): a, c, t, g, unknown or other
nnggnnc

SEQ ID NO: 94 - protein, 1108 aa, Brevibacillus sp.
  APG09748
MAIRSIKLKLKTRTGPEAQNLRKGIWRTHRLLNEGVAYYMKMLLLFRQESTGGQTKKELQEELVRHIREQQQKNRADKNTQALPLDKAFAALRQLYELLVPSSIGQSGDAQIISRKFLSPLVDPNSEGGKGTSKAGAKPTWQKKKEANDPTWEQDYEKWKKRREEDPTASVITTLEEYGIRPIFPLYTNTVADIAWLPLQSNQFVRTWDRDMLQQAIERLLSWESWNKRVQEEYSKLQEKMTQLNEQLEGGQEWISLLEQYEEQREQELIENMTAANDKYRITKRQMKGWNELYEQWSTVLPNASHEQYREALKRVQQRLRGRFGDAHFFQYLMKEEHHLIWKGNPQRIHYFVARNELKKRLEEAKQNATMTLPDARKHPLWVRFDARGGNLQDYYLTAEADNPRSRRFVTFSQLIWPNESGWMEKQDVEVELALSKQFYQQVTLQKNDKGKQEIEFKDKGSGSTFSGHLGGAKLQLERGDLEKEEKDFEGGEIGSVYLNIVIDFEPLQEVKNGRLQSPYGQVLQLVRRPNEFPKVTTYKSEELVEWIKSSTKDSAGVESLESGFRVMSIDLGLRTAAATSIFSVEESNDANAAGFSYWIEGTPLVAVHKRSYMLKLPGEQVEKQVREKRDERQDQQRRVRFQIRILSQVIRMAKKQNRERADELDHLSQALEKQKSLLDQTDRTFWNGIVCDLTDALREKEGGWEQAVVQIHRKAEEHVGKVVQAWRKRFDADERKGIAGLSMWSIEELDSLRKLLISWSRRTRNPREINCFEQGHTSHQRLLTHIQNVKEDRLKQLSHAIVMTALGYVYDEKKLEWFAKYPACQVILFENLSQYRSNMDRSTKENSTLMKWAHRSIPKYVHMQAEPYGIQIGDVRAEYSSRFHAKTGTPGIRCKMVSGHDLQGRRFENLQKRLISEQFLTEEQVKQLRPGDIVPDDSGEWFMTLSDGSEGKEVVFLQADINAAQNLQKRFWQRYNELFKVSCRVLIRGEEEYLIPKTKSVQAKLGKGLFVKKTDTVMKDVYVWDSQAKLKGKTTFTEESESPEQLEDFQEIIEEAEEAKGTYRTLFRDPSGVFFPEFVWSTQKDFWSEVKRRLYGKLRERFLMKTR

SEQ ID NO: 95 - RNA, 22 nt, Brevibacillus sp.
  APG09748 crRNA repeat
uggaaagcuucgagguuagcac

SEQ ID NO: 96 - RNA, 95 nt, Brevibacillus sp.
  APG09748 tracrRNA
cgacgguuagaggccguaugucgauuugcuuuaauuucgugcgugugcauugucguccuccauuacagggcggcuaccacgaauagccacgaagu

SEQ ID NO: 97 - DNA, 4 bp, Artificial Sequence
  Description of Artificial Sequence: Synthetic oligonucleotide
  APG09748 and APG09106 PAM
  modified_base (4)..(4): a, c, t, g, unknown or other
dttn

SEQ ID NO: 98 - protein, 1429 aa, Chryseobacterium sp.
  APG00771
MTKNILGLDLGTNSIGWALIKQDFENKQGEILGMGSRIIPMDAGDMGKFAEGATVSKTADRTKYRSVRRLRERFLLRRERLHRVLHLLNFLPQHYASQIDFEKRFGKFKVETEPKLAWKNIEGKFSFLFQNSFNEMLEDFKANEQDLKIPYDWTIYFLRKKALSQKIEKEELAWILLNFNQKRGYYQLRGEEEEENPNKLVEFYSLKVVDVLADEPQKGKSEIWYSLVLKNGWIYRRASKIPLFEWKDKTRDFIVTTDLNDDGSIKKDKDGNEKRSFRAPGENDWTLVKKKTEQEIEQSHKTVGTYIYETLLLNPKQKIKGKLVRTIERKFYKDELKQILEKQKEFHQELQNDDLYNDCIRELYRNNEAHQLTLSKKDFVHLLMDDLIFYQRPLRSQKSSISNCTLEFRKYKDENGIEHTQYLKAIPKSNPYYQEFRLWQWIYNLNIYRKDDEVNVTKDFLNTTKEFENLFEFLNSRKEVDQKALLKYFKLNEKTHRWNFVEDKKYPCNETKTMISSRLDKVENISDDFLTRNIEQKIWHIIYSVNDKIEYEKALKSFARKHHLDETSFFEAFRKFPPFKSEYGSFSEKAIKKLLPLMRLGKYWNYADIDKYSRERIQKIITGEYDENIKDKIREKAIHLTKENDFQGLQLWLAQYLVYGRHSEASMIGKWNSADDLEVFLKDFKQHSLRNPIVEQVITETLRVVKDIWLKYGNGTKDFFNEIHIELGREMKLPADDRKKLTSQISENENTNLRIKALLAEMINDHSVENVRPFSPMQQEILKIYEDGVLNSDIEIEDDILKISKTAQPSPSDLKRYKLWLEQKYKSPYTGQIIPLNKLFTPEYEIEHIIPQSRYFDDSFSNKVICESAVNKLKDNYIGLEFIKKLGGTVVECGNGKSVTVLKEDQYEDFVKKHYANNRGKRNKLLMEDIPEKMIERQLNDTRYISKYISGVLSNIVRVEDGSDEGINSKNIVPGNGKITSQLKQDWGLNDVWNDLILPRFERMNQLTNSTDFTAWNENYQKFLPTVPIEYSKGFSKKRIDHRHHALDALVIACATKDHVNLLNNQSAKSDTKRYDLKKKLMKFEKVVYHHTQTGEKIEREIPRQFLKPWENFTVDAKHNLESIIVSFKQNLRVINKATNYYEKYVEKDGTKNKERVEQTGTNWAIRKPMHKDTVSGKVDLPWVKVPKGKILTATRKSLDTSFDLKSIGSITDTGIQKILKNYLAFKDGNPEMAFSPEGIDDLNKNIEKYNDGKPHQPINKVRVFELGSKFQVGQTGNKKDKYVEAAKGTNLFFAVYEDEKGKRSYETIPLNEVIERQKQGLSVVDLKDTNDFYLCPNDLVYIPSGDELENVNNVDFKDIKKDKNERIYKVVSFSGSQIFFVRQDIATFIVNKAELSTLNKMERAIDGSMIKENCIKLNIDRLGNISKA

SEQ ID NO: 99 - RNA, 20 nt, Chryseobacterium sp.
  APG00771 crRNA repeat
guugugaauugcuuucaaaa

SEQ ID NO: 100 - RNA, 76 nt, Chryseobacterium sp.
  APG00771 tracrRNA
uuuugaaagcaauucacaauaaggauuauuccguugugaaaacauucaaggcggggcaacucgccuuuuuucguuu

SEQ ID NO: 101 - DNA, 6 bp, Artificial Sequence
  Description of Artificial Sequence: Synthetic oligonucleotide
  APG00771 PAM
  modified_base (1)..(2): a, c, t, g, unknown or other
nnraat

SEQ ID NO: 102 - protein, 1112 aa, Bacillus sp.
  APG02789
MAIRSIKLKMKTNSGTDSIYLRKALWRTHQLINEGIAYYMNLLTLYRQEAIGDKTKEAYQAELINIIRNQQRNNGSSEEHGSDQEILALLRQLYELIIPSSIGESGDANQLGNKFLYPLVDPNSQSGKGTSNAGRKPRWKRLKEEGNPDWELEKKKDEERKAKDPTVKIFDNLNKYGLLPLFPLFTNIQKDIEWLPLGKRQSVRKWDKDMFIQAIERLLSWESWNRRVADEYKQLKEKTESYYKEHLTGGEEWIEKIRKFEKERNMELEKNAFAPNDGYFITSRQIRGWDRVYEKWSKLPESASPEELWKVVAEQQNKMSEGFGDPKVFSFLANRENRDIWRGHSERIYHIAAYNGLQKKLSRTKEQATFTLPDAIEHPLWIRYESPGGTNLNLFKLEEKQKKNYYVTLSKIIWPSEEKWIEKENIEIPLAPSIQFNRQIKLKQHVKGKQEISFSDYSSRISLDGVLGGSRIQFNRKYIKNHKELLGEGDIGPVFFNLVVDVAPLQETRNGRLQSPIGKALKVISSDFSKVIDYKPKELMDWMNTGSASNSFGVASLLEGMRVMSIDMGQRTSASVSIFEVVKELPKDQEQKLFYSINDTELFAIHKRSFLLNLPGEVVTKNNKQQRQERRKKRQFVRSQIRMLANVLRLETKKTPDERKKAIHKLMEIVQSYDSWTASQKEVWEKELNLLTNMAAFNDEIWKESLVELHHRIEPYVGQIVSKWRKGLSEGRKNLAGISMWNIDELEDTRRLLISWSKRSRTPGEANRIETDEPFGSSLLQHIQNVKDDRLKQMANLIIMTALGFKYDKEEKDRYKRWKETYPACQIILFENLNRYLFNLDRSRRENSRLMKWAHRSIPRTVSMQGEMFGLQVGDVRSEYSSRFHAKTGAPGIRCHALTEEDLKAGSNTLKRLIEDGFINESELAYLKKGDIIPSQGGELFVTLSKRYKKDSDNNELTVIHADINAAQNLQKRFWQQNSEVYRVPCQLARMGEDKLYIPKSQTETIKKYFGKGSFVKNNTEQEVYKWEKSEKMKIKTDTTFDLQDLDGFEDISKTIELAQEQQKKYLTMFRDPSGYFFNNETWRPQKEYWSIVNNIIKSCLKKKILSNKVEL

SEQ ID NO: 103 - RNA, 36 nt, Bacillus sp.
  APG02789 crRNA repeat
gccugaauacuuagcagaaauaaugaugauuggcac

SEQ ID NO: 104 - RNA, 100 nt, Bacillus sp.
  APG02789 tracrRNA
auaauaaaggugaccuauagggucaaugaaucugugcgugugccauaaguaauuaaaaauuacccaccacaggauuaucuuauuucugcuaaguguuuag

SEQ ID NO: 105 - DNA, 4 bp, Artificial Sequence
  Description of Artificial Sequence: Synthetic oligonucleotide
  APG02789 PAM
  modified_base (4)..(4): a, c, t, g, unknown or other
attn

SEQ ID NO: 106 - protein, 1108 aa, Brevibacillus sp.
  APG09106
MAIRSIKLKLKTRTGPEAQNLRKGIWRTHRLLNEGVAYYMKMLLLFRQESTGGQTKKELQEELVRHIREQQQKNRADKNTQALPLDKAFAALRQLYELLVPSSIGQSGDAQIISRKFLSPLVDPNSEGGKGTSKAGAKPTWQKKKEANDPTWEQDYEKWKKRREEDPTASVITTLEEYGIRPIFPLYTNTVADIAWLPLQSNQFVRTWDRDMLQQAIERLLSWESWNKRVQEEYSKLQEKMTQLNEQLEGGQEWISLLEQYEEQREQELIENMTAANDKYRITKRQMKGWNELYEQWSTVLPNASHEQYREALKRVQQRLRGRFGDAHFFQYLMKEEHHLIWKGNPQRIHYFVARNELKKRLEEAKQNATMTLPDARKHPLWVRFDARGGNLQDYYLTAEADNPRSRRFVTFSQLIWPNESGWMEKQDVEVELALSKQFYQQVTLQKNDKGKQEIEFKDKGSGSTFSGHLGGAKLQLERGDLEKEEKDFEGGEIGSVYLNIVIDFEPLQEVKNGRLQSPYGQVLQLVRRPNEFPKVTTYKSEELVEWMKASQNHSSGVESLESGFRVMSIDLGLRTAAATSIFSVEESNDANAAGFSYWIEGTPLVAVHKRSYMLKLPGEQVEKQVREKRDERQDQQRRVRFQIRILSQVIRMAKKQNRERADELDHLSQALEKQKSLLDQTDRTFWNGIVCDLTDALREKEGGWEQAVVQIHRKAEEHVGKVVQAWRKRFDADERKGIAGLSMWSIEELDSLRKLLISWSRRTRNPQEINRFEQGHTSHQRLLTHIQNVKEDRLKQLSHAIVMTALGYVYDEKKLEWFAKYPACQVILFENLSQYRSHMDRSTKENSTLMKWAHRSIPKYVHMQAEPYGIQIGDVRAEYSSRFHAKTGTPGIRCKMVKGQELQGKRFENLQKRLVSEQFLTEEQVKQLRPGDIVPDDSGEWFMTLSDGSEGKEVVFLQADINAAQNLQKRFWQRYNELFKVSCRVLIRGEEEYLIPKAKSVQAKLGKGLFVKKTDTVMKDVYVWDSQAKLKGKTTFTEESESPEQLEDFQEIIEEAEEAKGTYRTLFRDPSGVFFPEFVWNTQKDFWSEVKRRLYGKLRERFLMKTR

SEQ ID NO: 107 - RNA, 22 nt, Brevibacillus sp.
  APG09106 crRNA repeat
uggaaagcuucgagguuagcac

SEQ ID NO: 108 - RNA, 105 nt, Brevibacillus sp.
  APG09106 tracrRNA
cgacgguuagaggccguaugucgauuugcuuuaauuucgugcgugugcauugucguccuccauuacagggcggcuaccacgaauagucacgaaguuccacugagu

SEQ ID NO: 109 - protein, 1071 aa, Bacillus sp.
  APG05733.1
MRELDYRIGLDIGTNSIGWGVIELSWNKDREQYEKTRIVDKGVRMFDKAEIPKTGASLAEPRRIARSSRRRLNRKSQRKKDIRNLLVQHEIISQKELTSLYPLSKSSMDIWDIRLDGLDRLLDRFEWARLLIHLAQRRGFKSNRKSELKDVETGKVLSSIQVNEKRLSLYRTVGEMWMKNADCSKYGKRRNSPNEYVFSVSRADLEKEIVTLFEAQRKFHSSYASVDLQKTYIQIWAHQLPFASGNAIVNKVGYCSLLKGKEKRVPKATYTFQYFNTLDQINRTRLGPNFQPFTKEQRDIILDKMFQRTDYYKKKTIPEVTYYDIRKWLALDETIQFKGLTYDPNEELKKIEMKPFINLKPFYEIKKVVTNYAKKTNEVFSALDYDTVAYALTVYKTDKDIRSYLKRSNNLSKRCYDDQLIEELLTLSYTKFGHLSFKAINHVLPIMQEGRTYQEAIHQLGYDTTNLKKENRSMFLPIIPDEITNPIVKRALTQARKVVNAIIRRYGSPNSVHIELARELSKSHDERKKIMTAHDENYKKNKGAISILIENGILNPTGYDIVRYKLWKEQGERCAYSLKKIPANTFFNELKKERSGPPVLEVDHILPYSQSFIDSYHNKVLVYGDENQKKGNRIPYTFFSEEDKEWESFESYVRSNSFFSKKKRGYLLKKAYLPRESNLIKERHLNDTRYASSYLKNFIEKNLKFKEAVGITRKKYVQTVNGVITAHLRKRWGLEKDRQETYLHHAMDAIIVACTDHHMVTKVTEYYQIKEGNKSIKKPYFPLPWMGFREEILSHLESQPIARKISEELKIGYQSSDYILVSRMPKRSVTGSAHDQTVMKKGGIDKKGKTIIIKRVHLKDIKFDENGDFKMVGKEQDLATYEAIKQRYLEYRKKSKKAFETPLYKPSKKGKGNLIKKIKVEVQTKSFVREINGGVAQNGDLVRVDLFEKDNRYYMVPIYVVDTVRSELPNKAVTSSKGYEQWLSIDNSFTFKFSLYPYDLVRLVKGDEDRFLYFSTLDINSDRLNFKDVNKPSKQAEYRYSLKTIENLEKYEIGVLGDLRLVRQETRKIFK

SEQ ID NO: 110 - RNA, 34 nt, Bacillus sp.
  APG05733.1 crRNA repeat
gucauaguuccauuaaagccauugcuguuuuaug

SEQ ID NO: 111 - RNA, 148 nt, Bacillus sp.
  APG05733.1 tracrRNA
caugauacagcaauggcuuugauguuucuaugauaagggcuucggcccguggcguuggggaucgccugcccauuuuaaugggcuucuccccaucuauuuaaugagaaauuuacaaccuuggcuauucuuaaauagcuaagguuuuuuu

SEQ ID NO: 112 - DNA, 6 bp, Artificial Sequence
  Description of Artificial Sequence: Synthetic oligonucleotide
  APG05733.1 and APG06877.1 PAM
  modified_base (1)..(4): a, c, t, g, unknown or other
nnnncc

SEQ ID NO: 113 - protein, 1403 aa, Chryseobacterium sp.
  APG06207.1
MVERILGLDLGVSSIGWALVEEDVENPENNKIIKLGVRVNPLTIDEKTNFEKGKSITTNAGRTSARSARRNLQRFKLRRKSLWEVLINYKIIKNDTVLAEIGKNSTFQTQYLRAKAAKEKIELDELARVLFLINKKRGYKSSRKVQSDDEGKAIDGMSVAKELYEKNYTPGQYVYDLLKNGKKQIPDFYRSDLQNELDRVWEFQKQYHPDILTDEYKKELEGKGQRATAAIFLNRYKIYTADNKGTREEKRFQAYQWRVEALSQPLDIKEVAYVITEINNNLNNSSGYLGAISDRSKKLYFNGQTIGEYLYEELSLNPHARLKNQVFYRQDYQDEFEKIWETQAKFHSVLTTELKEDVRDIIIFYQRKLKSQKGLISFCEFESKEIVIEENGKKKRKKVGLKVVPKSSPLFQEFKIWQVLNNIEIKNEDGRRYLDQEEKELLFNELNCKGNLTSQKCLEFLGFKSKETKINFKVIEGNRTNEKLYDAFLKILELKGYNVFELLKIKEDRDEAKLSELKASADEIKRMVKEIFNANLINTSILDFNAELEGKDFENQASYQFWHLIYSYEGDNSPSGNEKLYELLENKFGFKKEHSKILSTIVFPQEYGSLSAKAMRRIYPYIKDNKYSEACLLAGYNHSKQSLTKEELENRKLKEQLEVLPKNSLRNPVVEKILNQMINLVNAIISEHGKLDGVRIELARELKKSAQEREDMTKSINEATILHQKYATVLRQEFGVVNPSRNDIIRYKLYMELAGNGYKDLYTNVKIEKENIFTDKYDIDHIIPQSRFFDDSFSNKVLVPRQANLDKGNLTGYDFMSNKGAEREEHFLNVIKDLLENGSISKAKYEKLKKKGIEIGDGFIERDLRDTQYIARKAKEILFEITNSVISTSGRITDKLREDWDLVNTMKELNLDKYRRLGLTEIVINSKGEEKEVIPDWTKRNDHRHHAMDALTVAFTTRNHIQYLNYLNARKDEKHKEHQNIYAIENIITEIIEKKNGSKSRRFKTPMNRFRHEAKQHLKEVLVSHKTKNKVVTSNINKTKKKRGIHKKAELTPRGQLHKETVYGSKKFLQSREEKVSAKFDYETILMVVNPIHRNALLNRLKEYGNDPKKAFSGKNAVNKTPVYLSDSKIEVLPEKVTLSWFETGYTIRKAVTPDNFKDYKNLEKITDMGIKKILKERLDQFKGNAKEAFSNLDKEPIWLNEEKGIAIKTVTITGVSNAESLHFKKDHLGKEILDENGNKIPVDFVSTGNNHHLAIYLNEEEKLDDKMVTFYEAVLRVNQGLPVIDKNYNREKGYKFLMTLKQNEMFVFPNEEFDPSEIDLLDEKNLEQISQNLFRVQKISKVGYGNSFIRDFVFRHHLETTVEDRKELRNTTYIQLKSLEGLRNIVKVRLNHLGKIVQIGEY

SEQ ID NO: 114 - RNA, 24 nt, Chryseobacterium sp.
  APG06207.1 crRNA repeat
guugugaaaugcuuucaaaacuua

SEQ ID NO: 115 - RNA, 78 nt, Chryseobacterium sp.
  APG06207.1 tracrRNA
auaaauuuugaaagcacuucacaauaaggauuauuccguugugaaaacauucaaggcggggcaacucgccuuuuuuuu

SEQ ID NO: 116 - DNA, 6 bp, Artificial Sequence
  Description of Artificial Sequence: Synthetic oligonucleotide
  APG06207.1 and APG02675.1 PAM
  modified_base (1)..(1): a, c, t, g, unknown or other
nrrttt

SEQ ID NO: 117 - protein, 1404 aa, Sphingobacterium sp.
  APG01647.1
MMKRILGLDLGTSSIGWAYVLEAQDENEISQIKKLGVRVNPLTTDEQLNFEKGKPITTNAGRTLARSARRNLQRYKLRRENLIEVLKREKWIDDKSILAENGNKSTFETYALRAAAASKEIKLEELARVLLMINKKRGYKSSRKVNKEDDGQLVDGMEVAKKLYHENLTPGEFVYRLLKEGKKKIPDFYRSDLQRELDLIWDFQFKYYPDLLTQDLKEELKGKGLRATSAIFWSKYKFNTAENKGTREEKKIQAYQWRKDGLTKQLEQEEVAYIIAEINGQLANSSGYLGAISDRSKELYFNKQTVGQFLFNQLQHNTHARVKNQVFYRQDYLDEFEKIWSVQSQYHQGLTEQLKEEIRDIIIFYQRKLKSQKGLISFCEFEQHEVVINGKNKIVGLRVAPKSSPIFQEFKIWQQINNVKLRNKITKEVYNLAEEQKRSLFETLNLKGKLSAYQVLNLIEVKPKEWELNYTELEGNSTNLALYNAYLDILDIEGYDVRSELKIKLNKDEITLSDLDIPVSEIKGMIRRIFQHLGINTSILDFNAQMQGDDFEKQLSYQLWHLLYSYEEDNSKTGMERLYNQLNLKFGFSLDQAKIFGKIALQEDYGNLSTKAIRKIYPYIQDVEYSVACKQAGYNHSKSSLTKEQLTNRVLKDHLDILPKNSLRNPVVEKILNQMVNVVNTLIETENDKLIKEGKNADFRFDEIRIELARELKKNAKEREELTKAINTSKSEHEKIIKILQTEDGIKNPTRNDIIRFKLYQELKNNGYKNLYTNEYIQRKDLFTNVYDIDHIIPQSRLFDDSFSNKVLVPRNINIEKGNQTAFDYVHAKFGEDGIEAYEARVERLFNLKEEGVSRSKYKKLLMRGLDIGEGFIERDLRDSQYIAKKAKAMLFEIAPSVISTSGSVTDRLREDWGLVSVMKELNLPKFKAVGLTEYLETKDGNRKEVIKDWSKRNDHRHHAMDALTVAFTKHSHIHYLNHLNARKNEKSEFFSTIKAIEIKETYVERDDLGNRKRLFKEPIPHFRSIAKEHLESVLVSHKAKNKVVTKNRNKIDGKKQAQEVLTPRGQLHKESIYGKILQYASKEEKISAKFDAATIAMVSNPRYRSALLDRLSAYGNDPKKAFTGKNSPNKSPIYLDQEKQLAVPEKVKLVWLEEDYTIRKEIGPDLKIEKVIDQGVKRILEQRLTEYGGDSKKAFSDLDNNPIWLNKEKGIAIKRVTISGVKNAEALHIKKDHLGQVLKDKDGKPMPVDFVSTGNNHHVAIYEDDNGALQERIVPFYEAVARVNNGFPIIDKHYNQHLGWKFLFSMKQNEMFLFPSEEFDPKQINLLDRSNYRLISKNLFRVQKFGELSKSGFWFRHHLETSVDVNKSLRSISYFDFYSKDFMKNIAKVRINHLGEIIHVGEY

SEQ ID NO: 118 - RNA, 18 nt, Sphingobacterium sp.
  APG01647.1 crRNA repeat
guugugaauugcuuucau

SEQ ID NO: 119 - RNA, 72 nt, Sphingobacterium sp.
  APG01647.1 tracrRNA
augaaagcaauucacaauaaggauuauuuccguuguguaaacauuuagcgccucgucuaucuacggggcauu

SEQ ID NO: 120 - DNA, 7 bp, Artificial Sequence
  Description of Artificial Sequence: Synthetic oligonucleotide
  APG01647.1 PAM
  modified_base (1)..(2): a, c, t, g, unknown or other
  modified_base (5)..(5): a, c, t, g, unknown or other
nnrrngg

SEQ ID NO: 121 - protein, 1453 aa, Chryseobacterium sp.
  APG08032.1
MMIKNILGLDLGTNSIGWALIKQDFENKYGEILGMGSRIIPMDQKVLGEFGSGNSVSQTADRTKYRGVRRLRERFLLRRERLHRVLNVLNFLPIHYASQIDFEKRFGKFREEIEPKLVYNNDGFIFKNSFEEMLSDFRKHQPQILENDKKIPYDWTIYYLRKKALTQKIEKEELAWILLNFNQKRGYYQLRGEDIEEEKDKTFVRLKVEKIVDSGDNVKGKILYDVYFDNGWKYDKQIVKTEDWIERVKEFIVTESFLKNGDIKRTYKAVDSEKDWIAIKTKTEQEIEKSHKTVGTYIYETILHNPKQKIKGKLVRTIERKFYKDELRQILEKQKEFHPELQNDDLYSDCVRELYRNNEAHQLTLSKKDFVHLFIEDIIFYQRPLRSQKSSISNCTLEYRRYKDKHGVEHIQYLKAIPKSNPYYQEFRIWQWMYNLNIYKRDDDTNVTKEFLNSTEDFENLFDFLNNRKEVEQKALLKHFKLNEKTHRWNFVENKKYPCNETKTMISSRLDKVENISENFLTSEIEHKIWHIIYSVNDKIEYEKALKSFANKNNLDEVSFFEAFKKFPPFKNEYGSFSEKAIKKLLPLMRVGKYWDEDEIVKNSDTYFKNIEDLLGNIARKEENISDDDRKKYNKTVNLKLREELEIFQDAEIASFQKLRLHIAQYLVYGRHSEASIIGKWNSADDLEEFLKEFKQHSLRNPIVEQVITETLRVVKDIWMKYGNGAKDFFNEIHIELGREMKLPAEDRKKLTSQISENENTNLRIKALLAEMMNDSSVENVRPFSPMQQEILKIYEDGVLNSGIEIEDEYLKISKTAQPSSSDLKRYKLWLEQKYKSPYTGQIIPLNKLFTPEYEIEHIIPKSRYFDDSFSNKIICESAVNKLKDNYIGLGFIKQFAGAIVELGFGKNVKVFEIEEYEDFVKKHYANNRGKRNKLLLEEIPEKMIERQLNDTRHISKYISSVLSNIVRVEDGTDEGVNSKNIVPGNGKITIQLKQDWGLNDVWNDLILPRFERMNQLTNSTDFTAWNKNHQKYLPTVPIEFSKGFSKKRIDHRHHALDALVIACTTKDHVNLLNNQSAKSDTKRYDLKKKLMKFEKVVYNHTQTGEKIERDIPKQFLKPWETFTIDAKNRLETIIVSFKQNLRVINKATNHYEKYVEKEGVKMKERVEQTGTNWAIRKSLHEETVSGKITLSWVETSKGEFITATRKPLDSSFTFEKINKITDTGIQKILNNYLEAKDNNPELAFSAEGIEDLNKNIEKYNDGKSHQPIIKIRLYEKGKGRFVLGQTGNKINKYVQGSPNLFFAIYKDENGKKIFESIRLDIVIERLKQGLQAIPETNQNGVSLYQSLSPLDLVYIPTEYELESPHILDFSKLNKTQITRLYNTNDFSGVTAYFSQNSFAKHIYPKEMDLSWNEKKQKLSGSFDSKTASYNNTSIKDIFIKVKVDRLGNISKA

SEQ ID NO: 122 - RNA, 29 nt, Chryseobacterium sp.
  APG08032.1 crRNA repeat
guugugaauugcuuucaaaaauuauuauc

SEQ ID NO: 123 - RNA, 83 nt, Chryseobacterium sp.
  APG08032.1 tracrRNA
uaauaauuuugaaagcaauucacaauaaggauuauuccguugugaaaacauucaaggcggggcaacucgccuuuuuucguuuu

SEQ ID NO: 124 - DNA, 6 bp, Artificial Sequence
  Description of Artificial Sequence: Synthetic oligonucleotide
  APG08032.1 PAM
  modified_base (1)..(2): a, c, t, g, unknown or other
nnraar

SEQ ID NO: 125 - protein, 1093 aa, Brucella sp.
  APG05712.1
MKTLGIDLGTASIGWAILDEASIIASGVRIFSQSEMAGRDPQSKASLAVARRDARGARRRRDRYLKRRRRLLDLLTEHGLAPADEKSRKALVREYEDGKDGDLSNSVYALRARALDEALTPYEIGRAIFQLNQRRGFKSNRKTDSNDPEQGKIATAIHVLDAKMDEDKARTFGEWLHMRRLKGLSVRARMTADGDSYDFYPSRAALEREFDRLMASQKRFHPDLLNSSVIDDIRKVVFHQRPLKPVQPGKCSYNHRESRLPKAHPLFQKFRLLKEVNELEIVGEDQRYVKLTPAQRDVLTLALRTGLTKQGRLPFSKLRSILKLGKEVRFNKEKDNRTDLEGDVIHFRVSRPDCFGNRWAAMPVEEQAAVTEKLRTEPDYSALLDWLKNEAGLDEAHARAVADTPVPDGFGRMGPSALSALADAMEHEIDAQGFVITEAEAAKRVYGRTNSEADPGRKGVDQLPKYQEVLQRHIPPGTGEPDDPYDEYMGRITNPTVHIALNQLRRLVNALIRKYGKPNKIAIEVGRELKLNEKQRNEVNREIGQNTRAAMARGQQLVEIFKQPNTGYNRLRLELWEDLNREQPLKRLCTYCGKAIAAHMLFNGETDIDHILPYSKTLDDSKANRLLCCTPCNREKKNYAPANVLQWRDHYGEILARATALPKNKQWRFAEDAMTRYEAEGGFLARQLTDMQYISRLALTYLAHLYDYEEPDLDGVYKRHDRVRALPGRMTEMLRRQWALNELLHGHNLAGGDGAKEKNRLDHRHHAIDAIVIACTSQSLINRLSTAAGEAEERGAARVVERIDPPWPSFREDVREAVNAIVVSHKPDHGTASRSGYDKGRGQTAGKLHNDTAYGETGEKDHNGNNLVVRRIAISDIKRSADIMKIRTNAHGHSELRDRLYEATRDLEGKAFEQAVTAFVKHDAKFKGIRHVRVTEVQNPVWITHGGGKYKKGYLPGGNDRFDVWELPDGKWDAEVVTTFDAHRPDFTPRMRIEHHNARKIMSLKKGDMIAYDDPDSGKRVIAIVRKFDQRNKQLYLDPHNEAGNLDQREKEKTYKPLRPMPNPLKKYRPRQVRVDEIGQVFDPGPWWEKRSD

SEQ ID NO: 126 - RNA, 27 nt, Brucella sp.
  APG05712.1 crRNA repeat
guugcgguuggccugcgauuucugaac

SEQ ID NO: 127 - RNA, 81 nt, Brucella sp.
  APG05712.1 tracrRNA
guucagaaaucgcaguccagccguuaacaagcugagauaugcaccaaauaaggcgcucgcuucggcgggcgcuuuuucguu

SEQ ID NO: 128 - DNA, 6 bp, Artificial Sequence
  Description of Artificial Sequence: Synthetic oligonucleotide
  APG05712.1 PAM
  modified_base (1)..(2): a, c, t, g, unknown or other
  modified_base (4)..(4): a, c, t, g, unknown or other
nnrnat

SEQ ID NO: 129 - protein, 1054 aa, Staphylococcus sp.
  APG01658.1
MKEKYILGLDLGITSVGYGIINFETKKIIDAGVRLFPEANVDNNEGRRSKRGSRRLKRRRIHRLERVKLLLTEYDLINKEQIPTSNNPYQIRVKGLSEILSKDELAIALLHLAKRRGIHNINVSSEDEDASNELSTKEQINRNNKLLKDKYVCEVQLQRLKEGQIRGEKNRFKTTDILKEIDQLLKVQKDYHNLDIDFINQYKEIVETRREYFEGPGQGSPFGWNGDLKKWYEMLMGHCTYFPQELRSVKYAYSADLFNALNDLNNLIIQRDNSEKLEYHEKYHIIENVFKQKKKPTLKQIAKEIGVNPEDIKGYRITKSGTPQFTEFKLYHDLKSIVFDKSILENEAILDQIAEILTIYQDEQSIKEELNKLPEILNEQDKAEIAKLIGYNGTHRLSLKCIHLINEELWQTSRNQMEIFNYLNIKPNKVDLSEQNKIPKDMVNDFILSPVVKRTFIQSINVINKVIEKYGIPEDIIIELARENNSDDRKKFINNLQKKNEATRKRINEIIGQTGNQNAKRIVEKIRLHDQQEGKCLYSLESIALMDLLNNPQNYEVDHIIPRSVAFDNSIHNKVLVKQIENSKKGNRTPYQYLNSSDAKLSYNQFKQHILNLSKSKDRISKKKKDYLLEERDINKFEVQKEFINRNLVDTRYATRELTSYLKAYFSANNMDVKVKTINGSFTNHLRKVWRFDKYRNHGYKHHAEDALIIANADFLFKENKKLQNANKILEKPTIENNTKKVTVEKEEDYNNVFETPKLVEDIKQYRDYKFSHRVDKKPNRQLINDTLYSTRMKDEHDYIVQTITDIYGKDNTNLKKQFNKNPEKFLMYQNDPKTFEKLSIIMKQYSDEKNPLAKYYEETGEYLTKYSKKNNGPIVKKIKLLGNKVGNHLDVTNKYENSTKKLVKLSIKNYRFDVYLTEKGYKFVTIAYLNVFKKDNYYYIPKDKYQELKEKKKIKDTDQFIASFYKNDLIKLNGDLYKIIGVNSDDRNIIELDYYDIKYKDYCEINNIKGEPRIKKTIGKKTESIEKFTTDVLGNLYLHSTEKAPQLIFKRGL

SEQ ID NO: 130 - RNA, 28 nt, Staphylococcus sp.
  APG01658.1 crRNA repeat
guuuuaguacucuguaauuuuagguaug

SEQ ID NO: 131 - RNA, 85 nt, Staphylococcus sp.
  APG01658.1 tracrRNA
ucauaccuaaaauuacagaaucuacugaaacaagacuauaugucguguuuaucccacuaauuuauuagugggauuuuuuuguuuu

SEQ ID NO: 132 - DNA, 4 bp, Artificial Sequence
  Description of Artificial Sequence: Synthetic oligonucleotide
  APG01658.1 PAM
  modified_base (1)..(2): a, c, t, g, unknown or other
nngg

SEQ ID NO: 133 - protein, 1076 aa, Bacillus sp.
  APG06498.1
MSELDYRIGLDIGTNSIGWGVIELFWNKDRERYEKVRIVDKGVRMFDKAEIPKTGASLAEPRRIARSSRRRLNRKSQRKKEIRNLLVQHGVITQEELDLLYPLSKKSMDIWDIRLDGLDRLLNHLEWTRLLIHLAQRRGFKSNRKSELKDAETGKVLSSIQVNEKRLSLYRTVGEMWIKDAEFSKYDRRRNSPNEYVFSVSRADLEKEIVTLFEAQRKFQSSYSSKNLQETYLQIWAHQLPFASGNAILNKVGYCSLLKGKERRIPKATYTFQYFSALDQVNRTRLGPDFQPFTQEQKEIILDKMFQRTDYYKKKTIPEVSYYDIRKWLELDETIQFKGLNYDPNEELKKIEKKPFINLKAFYEIKKVVANYAERTNEAFSTLDYDAIAYALTVYKTDKDIRSYLKKSNNLSKRCYDDQLIEELFTLSYTKFGHLSFKAINRVLPIMQEGRTYQEAIQQLGYDTTNLKKENRSMFLPLIPDEITNPIVKRALTQARKVVNAIIRRYGSPNSVHIELARELSKSHDERKKIMTAHDENYKKNKGAISILIENGILNPTGYDIVRYKLWKEQGERCAYSLKEIPPDTFFNELKKERNGSSILEVDHILPYSQSFIDSYHNKVLVYSDENRNKGNRIPYTYFLETNKDWEAFERYVRSNKLFSKKKREYLLKKAYLPRESELIKERHLNDTRYASTFLKNFIEQNLQFKEVEVNLRKKRVQTVNGVITAHLRKRWGLEKNRQETYLHHAMDAIIVACTDHHMVTRITEYYQIKESNKSVKKPYFPMPWEGFRDELLSHLASQPIAKKISEELKAGYQSSDYIFVSRMPKRSVTGAAHNQMIRRKGGIDKKGKTIIIKRVRLKDIKFDENGDFKMVGKEQDLATYEAIKQRYLDHGKNLKKAFETPLYKPSKKGTGNLIKRVKIEGQTKAFVREVNGGVAQNSDLVRVDLFEKDDKYYMVPIYVPDTVCSELPKKVVKSGKGYEQWLTLDNSFTFKFSLYPYDLVRLVKGDEDRFLYFGTLDIDSDRLNFKDVNKPSKQNEYRYSLKTIEDLEKYEVGVLGDLRLVRKETRRNFHEIKIN

SEQ ID NO: 134 - RNA, 20 nt, Bacillus sp.
  APG06498.1 crRNA repeat
gucauaguuccauuaaagcc

SEQ ID NO: 135 - RNA, 84 nt, Bacillus sp.
  APG06498.1 tracrRNA
ggcuuugauguuucuaugauaaggguuucggcccguggcgucggggaucgccugcccauuccgaugggcuucuccccauuuauu

SEQ ID NO: 136 - DNA, 6 bp, Artificial Sequence
  Description of Artificial Sequence: Synthetic oligonucleotide
  APG06498.1 PAM
  modified_base (1)..(4): a, c, t, g, unknown or other
nnnncc

SEQ ID NO: 137 - protein, 1108 aa, Brevibacillus sp.; identical to SEQ ID NO: 106
  APG09106.1

SEQ ID NO: 138 - RNA, 22 nt, Brevibacillus sp.
  APG09106.1 crRNA repeat
uggaaagcuucgagguuagcac

SEQ ID NO: 139 - RNA, 105 nt, Brevibacillus sp.; identical to SEQ ID NO: 108
  APG09106.1 tracrRNA

SEQ ID NO: 140 - DNA, 4 bp, Artificial Sequence
  Description of Artificial Sequence: Synthetic oligonucleotide
  APG09106.1 PAM
  modified_base (4)..(4): a, c, t, g, unknown or other
dttn

SEQ ID NO: 141 - protein, 1150 aa, Enterococcus sp.
  APG09882.1
MYSIGLDLGISSVGWSVIDERTGNVIDLGIRLFSAKNSEKNLERRTNRGGRRLIRRKTNRLKDAKKILAAVGFYEDKSLKNSCPYQLRVKGLTEPLSKGEIYKVTLHILKKRGISYLDEDDTEAAKESQDYKEQVRENAQLLTKYTPGQIQLQRLKENNRVKTGINAQGNYQLNVFKVSAYANELATILKTQQAFYPNELTDDWIALFVQPGIAEEAGLIYRKRPYYHGPGNEANNSPYGRWSDFKKTGQPATNIFDKLIGKDFQGELRASGLSLSAQQYNLLNDLTNLKIDGEIPLSPEQKEYILAELMTKEFTRFGVNDVVKLLGVKKERLSGWRLDKKGKPEIHTLKGYRNWRKIFAESGIDLATLPTETIDCLAKVLTLNTEREGIENTLAFELSELAESVKLLVLDRYKELSQSVSTQAWHRFSLKTLHLLIPELMNATSEQNTLLEQFQLKSDVRKRYSEYKKLPTKDVLTEIYNPTVNKTVSQAFKVIDALLVKYGKEQIRYITIEMPRDDNEEDEKKRIKELHAKNSQRKNDSQSYFMQKSGWSQEKFQTTIQKNRRFLAKLLYYYEQDGICAYTGLSISPELLVSDSTEIDHIIPISISLDDSINNKVLVLSKANQVKGQQTPYDAWMDGSFKKINGKFSNWDDYQKWVESCHFSHKKENNLLETRNIFDSEQVEKFLARNLNDTRYASRLVLNTLQSFFANQETKVRVVNGSFTHTLRKKWGADLDKTRETHHHHAVDATLCAVTPFVKVSRYHYAVKEETGEKVMREIDFETGEIVDEMSYREFKKSKKYERKTYQVKWPNFREQLKPVNLHPRIKFSHQVDRKANRKLSDATIYSVREKTEVKTLKSGKQKITTDEYTIGKIKDIYTVDGWEAFKKKQDKLLMKDLDEKTYERLLSIAETTPDFQEVEEKNGKVKRVKRSPFAVYCEENDIPAIRKYAKKNNGPLIRSLKYYDGKLNKHINITKDSQGRPVEKTKNGRKVTLQSLKPYRYDIYQDLETKAYYTVQLYYSDLRFVEGKYGITEKEYMKKVAEQTKGQVVRFCFSLQKNDGLEIEWKDSQCYDVRFYNFQSANSINFKGLEQEMMPAENQFKQKPYNNGAINLNIAKYGKEGKKLRKFNTDILGKKHYLYYEKEPKNIIK

SEQ ID NO: 142 - RNA, 19 nt, Enterococcus sp.
  APG09882.1 crRNA repeat
guuuuuguacucucaauaa

SEQ ID NO: 143 - RNA, 73 nt, Enterococcus sp.
  APG09882.1 tracrRNA
uuauugagaaucuacaaaaauaaggcauuuugccgaauuuaccgcccuacauauguagggcgguuuuuuuauu

SEQ ID NO: 144 - DNA, 5 bp, Artificial Sequence
  Description of Artificial Sequence: Synthetic oligonucleotide
  APG09882.1 PAM
  modified_base (1)..(4): a, c, t, g, unknown or other
nnnna

SEQ ID NO: 145 - protein, 1408 aa, Sphingobacterium sp.
  APG02675.1
MKRILGLDLGTSSIGWAYVLEAQDENEISKIEKLGVRVNPLTTDEQLNFEKGKPITTNAGRTLARSARRNLQRFKLRRNNLIEVLKREKWIDDKSILAENGNKSTFETYALRAAAASKEIKLEELARVLLMINKKRGYKSSRKVIKEDDGQLVDGMEVAKKLYHENLTPGEFVCRLLKEGKKKLPDFYRSDLQRELDLIWDFQFKYYPELLTRDFKEELKGKGLRATSAIFWSKYKFNTAENKGTKEEKKIQAYQWRKDGLTKQLAKEEVAYIIAEINGQLANSSGYLGAISDRSKELYFNKQTVGQFLFNQLQQNTHARLKNQVFYRQDYLDEFEKIWCIQSQFHQALTEQLKEEIRDIIIFYQRKLKSQKGLISFCEFEQHEVVVNGKNKVVGLRVAPKSSPIFQEFKIWQQLNNVKLRNNITKEVYNLAEEQKKLLFETLNLKGKLSAYQVLSLIEGKPKEWELNYTELEGNSTNSALYNAYLNILDIEGYDVRSELKIKLNKDEITLSDLDIPVSEIKDMIRRIFQHLGINTSILDFDAQMQGDDFEKQLSYQLWHLLYSYEEDDSKTGMDRLYNQLNLKFGFSLDQAKFIGKIALQDDYGNLSTKAIRQIYPYIQDAEYSAACKLAGYNHSKSSLTKEQLTNRVLKDHLDILPKNSLRNPVVEKILNQMVNVVNTLIDTENDKLIKEGKNADFRFDEIRIELARELKKNAKEREELTKAINTSKEQHEKIIKILQTEDGIKNPTRNDIIRFKLYQELKNNGYKNLYTNEYIQRKDLFTNIYDIDHIVPQSRLFDDSFSNKVLVPRNINIEKGNQTAFDYVRTKFGEDGIEAYEARVERLFNLKEEGVSRSKYKKLLMRGSDIGEGFIERDLRDSQYIAKKAKAMLFEITPSVISTSGSVTDRLREDWGLVSVMKELNLPKFKAVGLTEYLETKDGNRKEVIKDWSKRNDHRHHAMDALTVAFTKHSHIQYLNHLNARKNEKSEFFSSIKAIEIKETYVERDDLGNRKRLFKEPIAHFRTIVKEHLERVLVSHKAKNKVVTKNRNKIDGKKEAQEVLTPRGQLHKETIYGKILQYASKEEKISAKFDAATIAMVSNPRYRSALLDRLIEYGNDPKKAFTGKNSPSKSPIYLDQQRQLAVPEKVKLVWLEADYTIRKEIGPDLKIEKVIDQGVKRILKQRLSVYDGDTKKAFSDLDNNPIWLNEEKGIAIKRVTISGVKNAEALHTKKDHLGQVLEDKDGNTMPVDFVSTGNNHHVAIYEDSEGNLYDRVVSFYEAVERINQNLPIVDRHYKQEEGWKFLFSMKQNELFVFPSINFDPKEIDLLDKKNYKEVSKHLFRMQKFSKVEYGNSAVRDYVFRHHLETSIIDTKELRDIAYKVFKSIGEFKSFVKIRTNHLGEIVHLGEY

SEQ ID NO: 146 - RNA, 16 nt, Sphingobacterium sp.
  APG02675.1 crRNA repeat
guugugaauugcuuuc

SEQ ID NO: 147 - RNA, 72 nt, Sphingobacterium sp.
  APG02675.1 tracrRNA
gaaagcaauucacaauaaggauuauuuccguuguguaaacauuuagcgccucgucuaucuacggggcauuuu

SEQ ID NO: 148 - protein, 1429 aa, Chryseobacterium sp.
  APG01405.1
MMIKHILGLDLGTNSIGWALIKQNFENKYGEILGMGSRIIPMSQDILGEFGKGNSVSQTAARTDYRGIRRLRERFLLRRERLHRILNVLNFLPEHYASQIDFDKRFGKFKVETEPKLAWKNSDGKFSFLFQTSFNEMLEDFKAHGQDLKVPYDWTIYYLRKKALSQKIEKEELAWILLNFNQKRGYYQLRGEEEEENPNKLIEFYSLKIIDVLADEPQKGKSDIWYSLVLENGWIYRRSSKTSLLDWKDKIRDFIVTTDLNDNGSVKTDKEGNEKRSFRAPGENDWTLVKTKTEQEIDRSRKTVGTYIYETLLQNPKQKIKGKLVRTIERKFYKEELKQILEKQKEFHYELQSDDLYDDCIRELYRNNEAHQLTLSKKDFVHLFMEDIIFYQRPLKSQKSSISNCTLEFRKYKDENGVEHTQFLKAIPKSNPYYQEFRIWQWIFNLNIYKKDNDDNVTKEFLSTTEDFENLFEFLNNRKEIDQKALLKHFKLNEKTHRWKYVEDKKYPCNETKTMISERLKKVENISDDFLTRGMEQKIWHIIYSVNDKTEYEKALKSFAEKNNLDENSFFEAFRKFPPFKSEYGSFSEKAIKKLLPLMRLGKYWSYANIDLYSKNRIQKIITGEFDENIKDRVREKAIHLTAENDFQGLQLWLAQYIVYGRHSEATMIGKWNSADDLEEFLKEFKQHSLRNPIVEQVITETLRVVKDIWLKYGNGAKDFFNEVHIELGREMKQTKDERANATKTITENENTNLRIKALLAEMMNDHSVENVRPYSPMQQEILKIYEDGILKSDIEIDDDILKISKTAQPSSSDLKRYKLWLEQKYKSPYTGQIIPLNKLFTPEYEIEHIIPQSRYFDDSLSNKIICESAVNKLKDNYIGLGFIKQFGGTIIECGFGKRVKVFKAEEYEEFVKKHYANNRGKRNKLLLEDIPEKMIERQMNDTRHISKYISGILSHIVRVEDGTDEGVNSKNVIPGNGKITTQLRQDWGLNDVWNELVLPRFERMNQLTNSTDFTSWNENHQKYLPTVPVEFSKGFSKKRIDHRHHALDALVIACATKDHVNLLNNQSAKSDTKRYDLKKKLMKFEKTVYKDPQTEKRIEREVPKYFLKPWETFTVDAKNKLETIIVSFKQNLRVINKATNYYEKYVDKDGVKTKERVEQTGTNWAIRKPMHKETVSGKIDLPWVKVPKGKILTATRKSLDTSFDLKAIASITDTGIQKILKNYLEFKESPELAFSPEGIEDMNKNIKKYNGGKPHQPISKVRVFELGSKFQVGQTGNKKDKYVEAAKGTNLFFAIYEDRKGKRSYETIPLNEVIERQKQGLSVVDLKNINDFFLCPNDLVYIPSGDELENGGSIEIKNITKEKSERFYKVVSFSGSQIFFVRHDIAVSIVNKGEFSTLNKMERAIDGSMVKESCIKLKIDRLGNVLKA

SEQ ID NO: 149 - RNA, 19 nt, Chryseobacterium sp.
  APG01405.1 crRNA repeat
guugugaauugcuuucaaa

SEQ ID NO: 150 - RNA, 75 nt, Chryseobacterium sp.
  APG01405.1 tracrRNA
uuugaaaagcaauucacaauaaggauuauuccguugugaaaacauucaaggcggggcaacucgccuuuuuucguu

SEQ ID NO: 151 - DNA, 6 bp, Artificial Sequence
  Description of Artificial Sequence: Synthetic oligonucleotide
  APG01405.1 PAM
  modified_base (1)..(2): a, c, t, g, unknown or other
nnraat

SEQ ID NO: 152 - protein, 1440 aa, Chryseobacterium sp.
  APG06250.1
MKNILGLDLGTNSIGWALVKQDFKNKQGEILGMGTRIIPMSQDILGDFGKGNSVSQTAERTKYRSARRLRERFLLRRERLHRVLNILNFLPEHYASQIDFEKRFGKFKVETEPKLAWKNIEGQFSFLFQNSFNEMLEDFKANAQDLRIPYDWTIYYLRKKALSQKIEKEELVWILLNFNQKRGYYQLRGEEEEENPNKLVELYSLKVVDVFVDEPQKGKSDIWYSLVLENGWIYRRASKISLFDWKDKIRDFIVTTDLNDDGSVKTDKDGNEKRSFRAPGENDWTLVKKKTEQEIEQSHKTVGMYIYETLRANPKQKIKGKLVRTIERKFYKEELRQILEKQKEFHQELQNDDLYNDCIRELYRNNEAHQLTLSKKDFVHLFIEDIVFYQRPLRSQKSSISNCTLEFRKYKDENGAEHTQYLKAIPKSNPYYQEFRLWQWIFNLNLYKKDNDENVIKEFLTTTQDVENLFEFLNNRKEIDQKALLKHFKLSEKTHRWNFVEDKKYPCNETKTMIATRLEKVENISDDFLTREIEQKIWHIIYSVNDKIEYEKALKSFALKHNLDENSFFEAFRKFPPFKSEYGSFSEKAIKKLLPLMRLGKYWDYANIDQFSKGRIQKIINGEYDENIKDRVREKAVHLTSENDFQGLQLWLAQYIVYGRHSEASIAGKWNSADDLEEFLKDFKHHSLRNPIVEQVITETLRVVKDIWLKYGKGAKDFFNEIHIELGREMKLPADDRKKLTNQITENENTNLRIKALLAEMMNDHGVENVRPFSPQQQEILKIYEDGVLNSDIEIEDEYLKISKTAQPSPSDLKRYKLWLEQKYKSPYTGQIIPLNKLFTPEYEIEHIIPQSRYFDDSFSNKIICESAVNKLKDNYIGLGFIKQFGGTIIELGFGKSVKVFDIDEYEDFVKKHYANNRSKRNKLLLEDIPEKMIERQINDTRYISKYISGILSNIVRLEDGSDEGINSKNIVPGNGKITTQLKKDWGLNDVWNDLILPRFKRMNQLTNSTDFIAWNENFQKFLPTVPIEYSKGFSKKRIDHRHHALDALVIACATKDHVNLLNNQSAKSETKRYDLKKKLMKFERVVYLHTQTGEKIEREVPKHFLKPWENFTVDVKHNLDTVIVSFKQNLRVINKATNYYEKYAENGGARNKARVEQKGINWAIRKPMHKDTVSGKVDLPWVKVPKGKILTATRKSLDTSFDLKSIGSITDTGIQKILKNYLMLKDGNPELAFSPEGIEDLNKSIEKYNDGKPHQPINKVRVFELGSKFQIGQAGNKKDKYVEAAKGTNLFFAVYEDKNGKRSYETIPLNEVIERQKQGLPVVDLRSTNDFYLCPNDLVYILSDDERGNMTNNDFENLSDEQVKRIYKFVSCTGGEGHFIPYANATEIIKNENGTNSKSERMQNFYDGSCMLDKNSKPIMIKENCVKLKVDRLGNISKI

SEQ ID NO: 153 - RNA, 20 nt, Chryseobacterium sp.
  APG06250.1 crRNA repeat
guugugaauugcuuucaaaa

SEQ ID NO: 154 - RNA, 79 nt, Chryseobacterium sp.
  APG06250.1 tracrRNA
uuuugaaagcaauucacaauaaggauuauuccguugugaaaacauuuagagccucgacuaccuucggggcauuuuuauu

SEQ ID NO: 155 - DNA, 6 bp, Artificial Sequence
  Description of Artificial Sequence: Synthetic oligonucleotide
  APG06250.1 PAM
  modified_base (1)..(2): a, c, t, g, unknown or other
  modified_base (5)..(5): a, c, t, g, unknown or other
nnrrng

SEQ ID NO: 156 - protein, 1071 aa, Bacillus sp.
  APG06877.1
MRELDYRIGLDIGTNSIGWGVIELSWNKDREQYEKTRIVDKGVRMFDKAEIPKTGASLAEPRRIARSSRRRLNRKSQRKKDIRNLLVQHEIISQKELTSLYPLSKSSMDIWDIRLDGLDRLLDRFEWARLLIHLAQRRGFKSNRKSELKDVETGKVLSSIQVNEKRLSLYRTVGEMWMKNADFSKYGKRRNSPNEYVFSVSRADLEKEIVTLFEAQRKFHSSYASVDLQKTYIQIWAHQLPFASGNAIVNKVGYCSLLKGKEKRVPKATYTFQYFNTLDQINRTRLGPNFQPFTKEQRDIILDKMFQRTDYYKKKTIPEVTYYDIRKWLALDETIQFKGLTYDPNEELKKIEMKPFINLKPFYEIKKVVTNYAKKTNEVFSALDYDTVAYALTVYKTDKDIRSYLKRSNNLSKRCYDDQLIEELLTLSYTKFGHLSFKAINHVLPIMQEGRTYQEAIHQLGYDTTNLKKENRSMFLPIIPDEITNPIVKRALTQARKVVNAIIRRYGSPNSVHIELARELSKSHDERKKIMTAHDENYKKNKGAISILIENGILNPTGYDIVRYKLWKEQGERCAYSLKKISANTFFNELKKERSGPPVLEVDHILPYSQSFIDSYHNKVLVYGDENQKKGNRIPYTFFSEEDKEWESFESYVRSNSFFSKKKRGYLLKKAYLPRESNLIKERHLNDTRYASSYLKNFIEKNLKFKEAVGITRKKYVQTVNGVITAHLRKRWGLEKDRQETYLHHAMDAIIVACTDHHMVTKVTEYYQIKEGNKSIKKPYFPLPWMGFREEILSHLESQPIARKISEELKIGYQSSDYILVSRMPKRSVTGSAHDQTVMKKGGIDKKGKTIIIKRVHLKDIKFDENGDFKMVGKEQDLATYEAIKQRYLEYRKESKKAFETPLYKPSKKGKGNLIKKIKVEVQTKSFVREINGGVAQNGDLVRVDLFEKDNRYYMVPIYVVDTVRSELPNKAVTSSKGYEQWLSIDNSFTFKFSLYPYDLVRLVKGDEDRFLYFSTLDINSDRLNFKDVNKPSKQAEYRYSLKTIENLEKYEIGVLGDLRLVRQETRKIFK

SEQ ID NO: 157 - RNA, 24 nt, Bacillus sp.
  APG06877.1 crRNA repeat
gucauaguuccauuaaagccauug

SEQ ID NO: 158 - RNA, 138 nt, Bacillus sp.
  APG06877.1 tracrRNA
caauggcuuugauguuucuaugauaagggcuucggcccguggcguuggggaucgccugcccauuuuaaugggcuucuccccaucuauuuaaugagaauuuuacaaccuuggcuauucuuaaauagcuaagguuuuuuu

SEQ ID NO: 159 - protein, 1091 aa, Rhizobium sp.
  APG09053.1
MDIETLFAFDIGTNSIGFCVFALDENGEPYRIIDIGTRIYADGRDPQSKASLAVARREARAMSRRRDRYVNRRKAVLRTLTEYGLMPAEASARQALIAETSDRNGAAGEASANPYALRAMALDEKLPLYWIGRVLFHLNQRRGFKSNRKTDRKDNEKGVIALGIGELRAAMHKTKARTYGEWLAARREDGHVTRLRAGSDAFEGDGYAFYPERSLLEAEFREIWARQSSFYPDVLTEARGDHLFQVMFYQRPLKKPRVGKCAFNPLEERLAKAHPLFQEFRLYKEVNELELVLPDHSHKKLDIEQRNALVILLRANREVTFKKLRTALKLAPDIVFNKESESREKLRGDEVHSVLADKKRFGPQWGALSRERQWQIIQTLKDEENPEKLFGWLKEEFGFEGEKADAIANAPLPEGYGRLGETALSSMLDEMKAAVIPEAEAAKNCGYDHSKLGEDREEGEAFLPPYQEILSRQIPPGTNDPADIYDIRMGRFTNPTVHIGLNQLRRVVNALIARHGKPQFVSLELARDLQLSEKQKAEANRAIAKNTREAAARSKKLGEMGQLDTGYNRLLLKLWEELNPSKPEDRVCIYSGKPIGIDMLFSAEVDVDHILPWSKTLDDSQANKLLCLKSANRQKRNRAPADVPEWRDRYEEILARAARLAPNKRRRFAPNAMAEFEAEGGFLARQLTDTQYLSRMAREYLSCLFPSAEIDRRGERKKKIRVIVSPGRLTEMLRRNWGLNNILPDHNLGEMTQAKNRKDHRHHAIDAAVVGVTTRSLLQRIATAAGRLDEADFENLVRKMVSENPPWPTFREELQAAVNGIVVSHKPDHGTVSRKGYAEGKGRTAGRLHNDTAYGFGTDASGNPVAVRRKLFTSLEAKDIPMIRDPELQAELYAAIDGLDDRRALQDALLSFRRTHPKFKGIRRVRMAETLSFIPIRDSQGNVYKGYKGDANYRYDVWETLDGKWHADVVTMFNAHQPDWRSPVHQEHPTARRVLRLQQNDMVAYEHPNDGYTIARVVKFNTAGIVYFASHRESGSLKARDADKQDPFKYFSKSAAGLKDIQCRQIRIDAAGRVFDPGPQDRASKSTRKTN

SEQ ID NO: 160 - RNA, 29 nt, Rhizobium sp.
  APG09053.1 crRNA repeat
guugcggcuggaccgcguuuucugaucug

SEQ ID NO: 161 - RNA, 78 nt, Rhizobium sp.
  APG09053.1 tracrRNA
cagaucagaaaacgcggucuggccguuaacaagcuagaagcaccaaauaaggccguuccuucgggagcggcuuuuucu

SEQ ID NO: 162 - DNA, 3 bp, Artificial Sequence
  Description of Artificial Sequence: Synthetic oligonucleotide
  APG09053.1 PAM
  modified_base (1)..(1): a, c, t, g, unknown or other
ngg

SEQ ID NO: 163 - protein, 1401 aa, Myroides sp.
  APG04293.1
MKRILGIDLGTTSIGWAYVHEAENENEISSIEKLGVRVNPLTVDEQINFEKGKPITTNATRTLFRSARRNLQRFKLRRKHLIEILKHNNWISKQTLLTENGNHTTFETISLRDKAATQKVTLEELARVLLMINKKRGYKSSRKVNNTEEGQLIDGMEVAKKLYHEQLTPGQLSLQLIKQGVKRLPDYYRSDLNHELDLIWAFQQKFYPHILTSEFKELLKGKGLRATSNQFWTNYNFNTADNKGTREEKKLQNYQWRSDALIKQLDKEIVAYVISEINGQINNSSGYLGAISDRSKELYFNQLTVGQYLHRQLIANPHTRLKSQVFYRQDYLDEFEKIWETQSKFYPKELTTVLKNEIRDTVIFYQRKLKSQKGLISFCEFEQEQKIINGKTKTIGHRVIPKSSPLFQEFKIWQQLHNVVLRNKKTNVITPLAEEQKSHLFEELNLKGKLSSTQILKLIEDKPKDWELNYSELEGNNTNKALYNAYLDILDLEGYDIRDELKIKLNKDDIELSDLDVNASEIKEMIFSIFKHLGINTEILEFDATLKDKAFEKQASYQLWHLLYSYEEDNSPTGLDRLHNLLQKKFNFTLDQAKLVGNVLFQDDYGNLSSKAIKNIFPYITDNNYSTACELAGYKHSKHSLTKEENEKRELKSRLTILTKNSLRNPVVEKILNQMINVINTLIESENDKLVAQGKEPNFQFDEIRIELARELKKNAKEREELTKSMTQGKTNHEKIIKILQKEDGIKNPTRNDITRFKLYSELKNNGYKDLYTNEYIERKDIFSKEYDIEHIIPQSKLFDDSFSNKTLVRRNVNLKKGNQTAYDFILSEYGQEKANEFETRITNLYSLGKDEGISKSKYKKLLMQESEIGKGFIERDLRETQYIAKKAKSLLLEITRNVVSTSGGITDRLREDWGLVNVMKELNLKKFRDAGLTEFVEMKDGNKKEVIIDWTKRNDHRHHAMDALTIAFTKHNHIQYLNHLNARKNTKDELHTNIIAIEKKETTIITDERGNKKRIFKEPIPNFRNIAKSHLEAILVSHKAKNKVVTKNINKISGKKIGQQTLTPRGQLHKETVYGKIRQYVSKEEKVGPKFTKEVIELVSNPTYRDLLLKRLQENNNDPKKAFGGKNALSKSPIYINLEKNIIVPEVVKLVWLEDDYTIRKEISPELKIDKVVDEGVKRILQNRLALYNGDAKIAFSDLDNNPIWLSKDKGITIKRVTLSGVKNATALHTKKDHLGQPILDHKGQEIPVDFISTGNNHHVAIYEDKNGKLQESVVSHFEAVERVNQQLPIIDKTFNQHLGWKFLFTMKQNELFLFPSDDFNPNEIDLFDTRNYAVISKHLFRAQKLSTKDYSFRHHLETNVEDIKDLKTITWRREGLNGIQNIVKIRTNHLGEIVHIGEY

SEQ ID NO: 164 - RNA, 21 nt, Myroides sp.
  APG04293.1 crRNA repeat
guugugaauugcuuucaaaca

SEQ ID NO: 165 - RNA, 105 nt, Myroides sp.
  APG04293.1 tracrRNA
ugaaagcaauucacaauaaggauuauuccguugugaaaacaucuaguccucgacuaauuucggggaauaaagccuuaacucuguuaaggcuuuuuuuaguuuuuu

SEQ ID NO: 166 - DNA, 5 bp, Artificial Sequence
  Description of Artificial Sequence: Synthetic oligonucleotide
  APG04293.1 and APG06646.1 PAM
  modified_base (1)..(4): a, c, t, g, unknown or other
nnnnc

SEQ ID NO: 167 - protein, 1432 aa, Chryseobacterium sp.
  APG01308.1
MAKNILGLDLGTNSIGWALINQDFENKQGKILGMGSRIIPMSQDILGDFGKGNSVSQTAARTGYRGVRRLRERFLLRRERLHRVLNIINFLPEHYASQIDFEKRFGKFKEETEPKLAYNKDGFVFKDSFEEMLADFKNYQPQLLENDKKIPYDWTIYYLRKKALSQKIEKEELAWILLNFNQKRGYYQLRGEDFEEEKDKMFVRLKVEKIIDSGDNVKGKILYDVYFENGWKYDKQIVKTEDWIERVKEFIVTESFLKNGDIKRTFKAVDSEKDWIAIKTKTEQEIDKSHKTVGVYIYETLLQNPKQKIKGKLVRTIERKFYKDELKQILEKQKEFHQELKNDDLYNDCVRELYRNNEAHQLTLSKKEFVHLLMEDIIFYQRPLRSQKSSISNCSLEFRKYKDENGVEHIQYLKAVPKSNPYYQEFRIWQWIFNLNIYKRDDEQNPVTTEFLNTTTDIENLFEFLNNRKEVDQKALLKHFKLNEKTHRWKYVEDKKYPCNETKSMISERLKKVENIANDFLTREIEQKIWHIIYSVNDKIEYEKALKSFAKKNNLDENSFFEAFKKFPPFKSEYGSFSEKAIKKLLPLMRLGKYWNCENISDDSKERIQKIINGEYDENIKDRVREKAIHLTSENNFQGLQLWLAQYVVYDRHSEASMIGKWNSADDLEEFLKEFKQHSLRNPIVEQVITETLRVVKDIWLKYGNGAKDFFNEIHIELGREMKQTKDERLDATKRITENENTNLRIKALLAEMMNDNSVENVRPYSPMQQEILKIYEDGVLNSGIEIEDEYLKISKTAQPSPSDLKRYKLWLEQRYKSPYTGQIIPLNKLFTPEYEIEHIIPQSRYFDDSFSNKIICESAVNKLKDNYIGLGFIKQFGGTIVECGLGKNVKVFEVNEYEDFVKKHYANNRGKRNKLLLEEIPEKMIERQLNDTRHISKYISGVLSNIVRVEDGSDEGVNSKNIVPGNGKITTQLKQDWGLNDVWNDLILPRFERMNQLTNSTDFTAWNENHQKFLPTVPIEFSKGFSKKRIDHRHHALDALVIACATKDHINLLNNQSAKSDTKRYDLKKKLMKFEKGVYNHPQTGERIQRDVPKQFLKPWESFTIDAKNNLDKIIISFKQNLRVINKATNYYEKYVEKNGIKTKERVEQTGTNWAIRKPMHKETVSGIVNLPWVKVPKGKILTATRKSLDTTFDLKSINSITDTGIQKILRNYLEFKGSPELAFSPEGIEDMNKNIEKYNDGKLHQPINKVRVFELGSKFQVGQTGNKKDKYVEAAKGTNLFFAVYEDKNGKRNYETIPLNIVIERQKQGLLACPESNEKGEKLLFQLSPNDFVYLTTEEENDNATPINFSLLSKEQINNLYKIVSFTGNRLYGIPICVATTIVNKAEYTQLNKIEFTKEKDLLLKLNVNRLGDVKTFTANDIRKIFNRQE

SEQ ID NO: 168 - RNA, 16 nt, Chryseobacterium sp.
  APG01308.1 crRNA repeat
guugugaauugcuuuc

SEQ ID NO: 169 - RNA, 73 nt, Chryseobacterium sp.
  APG01308.1 tracrRNA
gaaagcaauucacaauaaggauuauuccguugugaaaacauuuagcgccucgacuaucuucggggcauuuuuu

SEQ ID NO: 170 - DNA, 6 bp, Artificial Sequence
  Description of Artificial Sequence: Synthetic oligonucleotide
  APG01308.1 PAM
  modified_base (1)..(5): a, c, t, g, unknown or other
nnnnnc

SEQ ID NO: 171 - protein, 1092 aa, Bacillus sp.
  APG06646.1
MRYSIGLDIGTTSIGNAVINKDLQRFEHLGVRIFDAAENPKDGSSLSAPRRLARSSRRRLRRRKHRVERTKQLLINKGLLTKTQVKNLYNSKNINLDIWDIRVSGIDRKLFNNEFARVLIHFSKNRGFKSNRKSELKEDDNGAILSAVKENRELMDEKGYRTIAEMLVSDEKYEGTKRNKGGDYSHVVARSDIENEICLLFQKQREYGHPFATEENEEAFLSIWSSQRPFSTKDDIVKKIGNCTLEPKEKRAPKSTYTFERFRALDKLNRLRILSTTAPSRPLTNEERKSILSSLFSKKEVKYKELRKLLKLTDDQRFNEIYYSPDETIEKTENRTFLSLESQYKIKKIIEKTESKNMQSSYHPIDYDTIGYALTVFKDDKDIQHYLQNSYIDSKGKAIPNMANREYNLELIEELLGLSFAKFGHLSLKALNNILPYMEEGEPYHIACEMASYQFSQRLSKEKHRLLPPIPVDEIPNPVVVRALTQVRKVLNSIIKKYGPPSDIYIELAREMSKPFKERKSLEREFNENRQINEKAKAHISELYRIPNDPRPHDILKFKLWNEQNGICPYSLKPISIEYLFNIGYAEVDHIIPYSRSFDDSNGNKVLVLTRENQNKLNRTPYEWFGHEENRWEDFVSFIRTMKVGKKKKNMLLKKNFDEEQEEQILSRNLNDTRYITRYIKSFIEDNLEFRTEENKEQYVHTVNGAYTSLMRKRWGLNKDRRGNDLHHAVDAAIIAVSLPFKNKVNAYFKRQETGLSKLLNNKKDIFPEPWRNFIKELEARMIQDPEKMKRALESLELETYGEIFLNKLKPIFVSRMPKHSIKGQIHEETIRRVRGFTEEGFLVTVKKTRLDQIPFDKNGDFPMYGKETDIKTYMAIKQRYLEYGQDKQKAFAVPLRKPSKNPKNAPIVRSVKIEGKANRVVMLDDKAAADNASIVRTEVFRHKKTGEYYLTPVYVADILSNKIPDRLITIKKSYSDWDRITDEHEYLFSLYNNDLVKIILPKEKETKKYTGGNHLWQEGFFYFKGVDSSNAGIKIINHLNSFEARIGTKRLIAFEKYQVNPLGEINKVHGEKRPGELLNKEEIKENRKNIS

SEQ ID NO: 172 - RNA, 23 nt, Bacillus sp.
  APG06646.1 crRNA repeat
gccauaauuccucuguaaaacuu

SEQ ID NO: 173 - RNA, 112 nt, Bacillus sp.
  APG06646.1 tracrRNA
aagguuuauagaguuauuaugguaaggcaauaugccguggcguuggggaucgccuauguccgguuuuaccggaucucccuaaaggugacuaacuuugguuagucaccuuuuu

SEQ ID NO: 174 - protein, 506 aa, Bacillus sp.
  APG09624
MSTPLQQPHQKSKKTSQMITTRKFKLAIVSDNRNEAYSFIRNEIRNQNKALNAAYNHLYFEHIATEKLKHSDEEYQKHLTKYREVATNKYQDYLKVKEKVNASKDDEKLQKRVDKAREAYNKAQEKVYKIEKEFNKKSMETYQKVVGLSKQTRIGKLLKSQFTLHYDTEDRITSTVLSHFNNDMKTGVLRGDRSLRTYKNSHPLLVRARSMKVYEENGDYFIKWVKGIVFKIVISAGSKQKANIGELKSVLINILNGHYKVCDSSISLNKDLILNLSLNIPVSKENVFVPGRVVGVDLGLKIPAYVSLNDNPYIKKGIGNIDDFLNVRTQLQNQRKRLQKTLECTSGGKGRSKKLKGLDRLKAKEKNFVNTYNHFLSKKIIQFAVKNNAGVIHLEELQFDKLKHKSLLRNWSYYQLQTMIEYKAEREGIEVKYVDASYTSQTCSKCGHYEEGQRVLQDTFTCKNKECKGYVHKVNADFNASQNIAKSTDIIRCTEMAKNNDIEKNA

SEQ ID NO: 175 - RNA, 11 nt, Bacillus sp.
  APG09624 crRNA repeat
aggauugaaau

SEQ ID NO: 176 - RNA, 201 nt, Bacillus sp.
  APG09624 tracrRNA
aaacagcuagaauguaacuuaaaguaggucaauguuuaaauucgauguugcaauuuguuuggacaaguggauuaaaacguuccuugaaaaucauauaaagcagccaguuuacgggcuugggcgaauuugcguccaaagggugaggccagguguaaguaagaaccuacaaaagcacucaccaaagggucaacucgauacauu

SEQ ID NO: 177 - protein, 506 aa, Bacillus sp.
  APG05405
MSTPLQQPHQKSKKTSQMITTRKFKLAIVSDNRNEAYSFIRNEIRNQNKALNAAYNHLYFEHIATEKLKHSDEEYQKHLTKYREVATNKYQDYLKVKEKVNDSKDDEKLQKRVDKAREAYNKAQEKVYKIEKEFNKKSMETYQKVVGLSKQTRIGKLLKSQFTLHYDTEDRITSTVISHFNNDMKTGVLRGDRSLRTYKNSHPLLVRARSMKVYEENGDYFIKWVKGIVFKIVISAGSKQKANIGELKSVLINILNGHYKVCDSSISLNKDLILNLSLNIPVSKENVFVPGRVVGVDLGLKIPAYVSLNDTPYIKKGIGNIDDFLKVRTQLQSQRKRLQKTLECTSGGKGRNKKLKGLDRLKAKEKNFVNTYNHFLSKKIIQFAVKNNAGVIHLEELQFDKLKHKSLLRNWSYYQLQTMIEYKAEREGIEVKYVDASYTSQTCSKCGHYEEGQRVLQDTFTCKNKECKGYVHKVNADFNASQNIAKSTDIIRCTEMAKNNDIEKNA

SEQ ID NO: 178 - RNA, 11 nt, Bacillus sp.
  APG05405 crRNA repeat
aggauugaaau

SEQ ID NO: 179 - RNA, 201 nt, Bacillus sp.; identical to SEQ ID NO: 176
  APG05405 tracrRNA

SEQ ID NO: 180 - protein, 1735 aa, Pedobacter sp.
  APG06622
MTKNILGLDLGTNSIGWALIKIDHENKTLKIIALGSRIIPMDGQEFSKFNAGQKIESAAGNRTALHRARITKERYLLRRDRLHLVLNLLEALPNHYKIEVDFERNDKRCGQFKEGKEPKMAYLPTKNLENKFDFYFEEAFNEMIEDLQKVNPEIKNEKKKRVPKDWTIYFLRNKAMSQKVSLEELAWVLLSYNQKRGTDSEEIENEDEKSEIKEQIDLKVIKAEKKVDVNGAFFEITLNDAENFKYKEYTTKQLTFEDDVKEVTKILKLDEAGNIINEKTAYQISDLYNLTLANIEHTDINDKKAKHKYDFIYTNGWCTEKKKENFDVTYQKLEKQIKEESKVITELFVVSNKYDFAGKPESIIPSIKLPDFNSEGSKDWTLLKKKTEKEIVKSEKTLSGWIYDVLKNDVNTGERTKIIGGLFQTIDRKFYREELYQIINTQRKFHTSTLDDKDTFEKCVKLLYPHNKDHSKTLLENKQALTNLLIEDILLYQRPLKSKKSEISDCKYEIDYWKEDVNISTGEVVEIPVYKKAIFASHPLFQEFRIWDKIHNIKLIQLESKDADGNTQTNVDITSQYFKPENYRALFNHFNGRSTVAIDDFLKFCEEQFKLGIGKKGERKILWNYPVEEEFKGNETRKGFENRFRKCGFDGFDDFMTQQKEIELWHYLYSVSSAERKKVSQVKDSSDPKFGKTGIWNFFTKYFKDENISLETLEKLCRDFETYPKFTSKYASYSVKALNKMLAVMRVGKNFLTAESVNEKWQEKYIERADTIIKKNNEIDWSAESIDLTDIILNDVNVKNGEIPFPKGLFNTFKSFETVDDFEFLNLTQASYFIYGRHSELAQAKYWNSPTKIREEITKELKHHSLNNPTAEKVLKETLKVVADIWEIYGNSEEKFFNEIHLEVARELQKSNQEKKDIIERQKNNRAENNRIRNILEEFLSSSPYNAKRGNQDHFERLKIVEDGAKVRSYSDKEFYSNNKDKFSKIDIEVILKKKKITQSDFEKYKLWIEQGYKSPYTDQIIKLTDLFDGNKYNVDHIFSRAAITNDSLNNKVVCEAVINRFKSYKTGREFIAQFGGKTHTIFDDKLNKNVTFSLIDEDAYVSLVKSQFKDAKRLILLSKEVPKAFTESQLNNAKYIARKAMELLSHIVREEGEVEFRSKNVLPVSGAITDRLKKEWKINQIWTELLKPRFERLNKIHNSEAFGSYAISKSGHQYFDINTKYILGENDKFDLKRLDHRHHALDALIIALCTDNHVQYFNNINSGITNKKKGKMEAIKKQRAGIKRQIMYSEKDKENPNEKVWRYMLPGSFRNKESVNNEKDSVVDLSWENNYSAKESNDYRKTILECLDNCIVSFKNDFKIVSKSSNKYESYYDENGNLRLDSNGKPQKEFISQQNNNQKHWSVRKPLHTDNPSAEITLQFDRLKLIDNLGKVDLIIEEKIKDAVKEILGMHNNKIGKAESYLKKNPLILEEKKIEYTDFKISNKKYRKRQPITNLSVRTGTGALPTYDSVVDRINKVSDFVLRNELLQHLKINDNDIDKAFSIEGINEFNSNRKIPVFRLPISESATLKFKIGHKNSNSHKWVETGGNFHFRIADEENSRDYETIPLRIAIEMEKDNIIRRQIVDNENEIVLSPNDLVYVPLEKNEIVDFNNLTIQQIKRIYKFVFSTKKEAHFIPYSSSAEIIKNENGTNGYSERTKDFFDGNVLQDDKGKPIQVKSVCWKLKVDRLGNISKA

SEQ ID NO: 181 - RNA, 17 nt, Pedobacter sp.
  APG06622 crRNA repeat
guugugauuugcuuuca

SEQ ID NO: 182 - RNA, 84 nt, Pedobacter sp.
  APG06622 tracrRNA
ugaaagcaaaucacaauaaggauuauuccguugugaaaacauuuggguugccucuuguccacaaaucaggaggcuuuuuuauuu

SEQ ID NO: 183 - DNA, 6 bp, Artificial Sequence
  Description of Artificial Sequence: Synthetic oligonucleotide
  APG06622 PAM
  modified_base (1)..(2): a, c, t, g, unknown or other
nnaarg

SEQ ID NO: 184 - protein, 1224 aa, Chitinophaga sp.
  APG02787
MKKLIVGLDLGVNSIGWAVVGDDDSNRQILGMGSRIIPLSPDDNNEFVTGNAISKNAKRTEKRTQRKGYDRYQQRRRKLVAFLERHSMMVEKELMCLPPLELWALRNKGITQALSSRELGRVLYHLNQRRGYRSSRSEESSDGKKNTAYVEEVKGRYEELKTRGITIGQHFYQKLQTAHNRNEPYRIKQQVFPRQAYIDEFDAIINQQKNHHSSLTADEIAFLRDEIIYMQRPLKSQKGLVSICEFEGQYRKNAKDAEVFVGPKVAPRSSPLAQVCKIWESINNITFTNKRREPYPINTDQKLRLFDALNKTERLSQKAIFFILGIKPGDGYTGNKQTAKGIQGNLTNAAISTIIPERKDLLNFELKIVVDEEDAHLINRSNGEIISTVQKKTVSADYERSPFFRLWHVIYSISDIDKCIETLMEKFGLTKEQAVALSRLDFRKAGFANKSARAMRKILPYLMDGHIFSDAMSLAGYNHSASLTHEENLKRQLKGSLPLLKKNSLRQPVVEKILNQMIGVMNAIIKEWGRPDEIRVELARELKQSAEERNKAFAALSKREREGEIITKRIEAEFRQFGIRATRNNILKWRLFHEISNDEARLNATCVYCGHPFGITDALRGSSVDIEHIIPKSKLFDDSQGNKTLVHRRCNEDKGDRTAFDFMSAKGESVLASYIETVDRLYQSNVISRHKRDRLLTTGDDIPKDFIERQLRETQYIARKAKEILEQICYNVWSTSGQITEYLRRIWGWNDVLMNLQLPVYRDLGLTEWKEYTDRDGNLHRQEVIKDWSKRNDHRHHAIDALTIACTRQGFIQRINRLNATNNREEMRASLNGNYDPKKNLLENYIFALKPFSTKQVEVAAAQILISFKPGKRVATLSKLKAKGKNSGTGVIVPRGPLSEESVYGRVRLMDSKKQPVRYLFEHPELIFKPYIRVLVEERLASYSQDLKKALASLKKDPIYLDGTKTIILEWGSCYKDEVVIKYPLTDIKAKDTQFIIDGHIRAIVNERLSQYKGNEKKAFEHPLYSDAACTKEIRSVRCLTGLTAVVSVKKDESGREIGFVKPGNNHHIALYTDAEGQKREHLCTFWHAVERKKWGMPAVITQPGVIWDNILQKQDNFPQAFLEKLPLEAWTFDKSLQQNEMFIVGLTIEEVQTCIDSFDYARLSKHLYRIQKLSSTGYKIVLRHHLATTIEHTRDMIGIASPSSFTGIKVYVSKTGKISMPHD

SEQ ID NO: 185 - RNA, 14 nt, Chitinophaga sp.
  APG02787 crRNA repeat
guugugauuugcuu

SEQ ID NO: 186 - RNA, 78 nt, Chitinophaga sp.
  APG02787 tracrRNA
aagcaaaucacaauaaggauuuuucuuccguugagaaaucauucacgccgcccucgucguuuaucgggggcuuuuuuu

SEQ ID NO: 187 - DNA, 6 bp, Artificial Sequence
  Description of Artificial Sequence: Synthetic oligonucleotide
  APG02787 PAM
  modified_base (1)..(2): a, c, t, g, unknown or other
  modified_base (5)..(5): a, c, t, g, unknown or other
nnrrna

SEQ ID NO: 188 - protein, 1457 aa, Mucilaginibacter sp.
  APG06248
MKNILGLDLGTNSIGWALIQSDFDNKEGKILGTGSRIIPMSQDIKDEYGKGNSISQTADRTRFRSLRRLRERHLLRRERLHRILNILGFLPEHYADQIDFKNRLGQYLPEKEPKLAYRNNEFIFKASFEEMLIDFREQQPEMLQGDKKVPYDWTIYYLRKKALTQKVEKAELAWLILNFNQKRGYYQLRGEEQQENPNKKVEFHSLKVVDVIADETQRGKAETWYSLILENGWVYRRSSKTPLDNWRDKQRDFIVTTDLNDDGSIKKDKDGNIKRSFRAPDENDWTLLKKKTEQDIDHANKTAGAYIYDHLLVAPDQKIKGKLVRTIERRFYKTELKAILAKQQNFHAELQNKDLFLDCVRELYRHNLSHLSNLNQKDTIHLLTEDIIFYQRPLRSQKSSIGNCPLEFRRYQNKEGGDQTEYLKVIPKSHPLYQEFRLWQWIYNLGIYQKEDDTNVTADLIKGIQGYQDLFDFLNSKKEIKQDTLIKFLLSQTGLKGKELNKAALTLRWNFVEDKTYPCNETGTEIRARLAKVAYIPENFLTAEKALSLWHIIYSVNDKKEYELALRKFAKKHQIDEETFFINFQKFPPFQSEYGAFSEKAIKKLLPLIRLGKYWHWEAIDPKSQERIEKILSGEADQNIKERIREKAMHLTREEHFQGLQLWLANYIVYDRHAEAANPDKWSTVSDLEDYLKELKQHSLRNPIVEQVVTETLRVVKDIWLTYGNGAKNFFDEIHIELAREMKNTMEERKRLTSIVTDNENTNLRIKALLVELFEDGNIENVRPYSPIQHEALKIFEDGILNSGIEIDDDILKISKTPQPTSTELKRYKLWLEQKYRSPYTGNVIPLNRLFTTDYEIEHIIPQSRFFDDSFSNKIICESAINKLKDKQLGLEFIKNHAGTIVELGLGKTARVFDEERYQDFVKANYTKNPGKRSKLMLEEIPDKMIARQLNDTRYISKFITSVLSNIVRSETKDDGVNSKNVLLCNGRITSVLRQDWGMNDIWNELILPRFERLNQITDSTVFTAWNENHQKFLPTVPMGFSKGFQRKRIDHRHHAMDALIIASCTRDHINLLNNEYAKSSKRFDLNRKLRKFEKVAYKSPVNGQQIDKDIPTVFIKPWQRFTIDAKCSLEDIIVSFKQNLRVINKTTNYFDGYKDEHGIVNFDNKGAPVKQQRKQTKGDSWAIRKPMHKDFVYGKVDLKHIKIPKGKFATAIRKSLDTTFDQKKIQTITDTGVQKILINYLQSKDNKAELAFSPEGIEDMNQNIRAYNDGKLHQPIKKVRVFEIGSRFPLGETGNKKTKYVETAKGTNLFFAIYQHKNKRNYETVPLNTVIERQKQHLSPVPTEDDKGGTLLFYLSPNDLVYVPTPDELGNNLGGLDIRNLNKEQRRRIYKVEKASGVECYFIRQDIAYLIKSYDATTKIGELESQNKLQTTMSSDRLKIADVCIKLKIDRLGISR

SEQ ID NO: 189 - RNA, 18 nt, Mucilaginibacter sp.
  APG06248 crRNA repeat
guugugauuugcuuucau

SEQ ID NO: 190 - RNA, 75 nt, Mucilaginibacter sp.
  APG06248 tracrRNA
augaaagcaaaucacaauaaggauuauuccguugugaaaacaucuaagucgccucgccuuacaaugcggggcuuu

SEQ ID NO: 191 - DNA, 5 bp, Artificial Sequence
  Description of Artificial Sequence: Synthetic oligonucleotide
  APG06248 PAM
  modified_base (1)..(2): a, c, t, g, unknown or other
nnraa

SEQ ID NO: 192 - protein, 1662 aa, Acidovorax sp.
  APG06007
MKKILGLDIGTTSIGYSIIKVSDEKNENIISDKVAASDINNDRIGIFEEAIGVRIINQDTDRFDRGLKLNDPKGSTLTPTANRRKFRGVRRMRNRYKLRRNKLYKVLSILGLTPDESYFTNKKGKRGKDNDIGKALYGLRERAAREKISLSELARVLLHLNQLRGYSSDRFANDEETKFDYYLTEVVEADWENRTAVFEKGSTEDVKYYQFKAKLRFVEPYVIVEDDEKTILYEVEGYIFKKELDFEVGDFITIKAPEFKQNKKGKVVIEEYYKITPTKPDATDWKYKYQTLHKNLSDWCKAGGTVGSYFYKNFYELTTLSRIRNNVVNREWYENEFDAIWTLQYEFYKDFFEKIDVSELVKGVFKDYSAVLNDVISKSGNKAQLQTLIKDKIIFYQRPWQQAKSKGRCEFEKIKVKRKFAIKGTGTKELREEHIGRKVVPRSHPIFQDFKVWQQINNVRLIWNTADEKINLFENAELSEKLTGKTIEKVKELLFKKLQGSKTLSWRTFVKEELGLDTYDEIEEKRKSKVSKKQGLDIETGEIVDSFFSVNFRKRKRDGTFDDIKLKGNTTKAELQNILKEKRAEWFDTLHNQNKKVTNLQLLWEIIYDITNSDATKVSSIIKKHFDFDESVCLTLAKVQFDDAGMANLSAKAIRNLLPLMSDGANYSKITKAKVDELISLNTSETDVDADDKLNGLKDFVTDRKARIRLSKFSNENDFKYLNYWEAAAIVYGSHSSKKSSETKIMERVKNHSMNNPVVEKIVNEAISIVNLLKEKYGFDEIRIELSRELRASADERQQMWEGMSNGAAKNEWAKKMLREIKQAMLDNNRDISYLDTEISNSNLDKIKIIEDVVKYQKPVEFKTKEKEYKLTEPTKAEVTKYLLWLEQNFKCPYTNQPIPLTDVFARGKVVEIEHIIPRERYYSNAYANKVITWREVNQEKGNKTAYEFIVSKRNPAGTVQVGKKEISLVSASQWENHVKEMFPKSGKRTNLLRKEIPEDPIERTLKENQYINKKLKEKLGELVGSDKVWVTSGAITDMLREKWKLNDIWKELVQERFLKFNNGEVKDRLNLKYTTKYYNNKTNQYEDVEKFAGMSKRIDHRHHALDAIIIACTKQSHIQYINNLNAINSADIENDDNKKTKYKGIKTDVCIGNSSSKFKFPWDENKFIPEVKQALQNILISHKNSNVLISPSKHRNNKDINSGKVASVRGELHLQTNYAKKKYFENEKIDIVKLIPLLFKKKFENQNQTLVRFKSFDEIIKEAVLKEKYQNVLISLFKDYDSEKLSTQTTKDFSKKILKRIEDEKLFIHEKSGEKMTWLSTFTEKNASVRPMGLAMDLNSEKEIKDISNPRLRRIGQYRLNYINKKIIEIKALKLPFKEEENNRIREVREIPLYNNAIYELRIKQKDGKYHWVEIKDVQHSDLENIEYAKQETTIAVKNKIKDFSLDELKERYISNPIFLSEKPTPVKKARQKSFFQDLYQLNDGRYVYSRDVFMTYVFVPEDSNRKDAKRELEFLKFFDAVKIVTLEKPEKIDYQKLIKKEDHKLLFTLSKNDIVYIPEEILTDEQIAEINWNDKRDIVPKLFVVKEMTPSRNEIVFQHLYKSDSIRVNGDEAKNILNTEKLEEQIKYGDTNMWKRCIKVDIDKLGTEIKPYWENNKIVL

SEQ ID NO: 193 - RNA, 14 nt, Acidovorax sp.
  APG06007 crRNA repeat
guugugaauugcuu

SEQ ID NO: 194 - RNA, 63 nt, Acidovorax sp.
  APG06007 tracrRNA
aagcaauucacaauaaauuuuuaauguugugaaaacauucaaagcggcgcaagucgcuuuuuu

SEQ ID NO: 195 - DNA, 6 bp, Artificial Sequence
  Description of Artificial Sequence: Synthetic oligonucleotide
  APG06007 PAM
  modified_base (1)..(4): a, c, t, g, unknown or other
nnnntc

SEQ ID NO: 196 - protein, 1075 aa, Bacillus sp.
  APG02874
MDYRIGLDIGTNSVGWGVIRMQYNDLLERYEKQGIVDAGVRMFDKAEIPKTGASLAAPRREARSSRKRLRRRSQRKKAIRYLIILHELLSEDQLQQLYPLQKESIDIWDIRLESLDRVLNQTEWARLLIHLGQRRGFKSNRKSEYKEEETGKVLVNIQENQKALQQYRTVAEMWMKDAKFSQFDKKRNAPGEYLFSVSRYDLQNEIQTIFESQRNLGSPYATTDLEEEYISVWSKQLPFASGEDILKKVGYCSLERKERRIPKATYTFQYFILLDGLNKIRVGADARQLTTEERSILIEKILTRNDYFSKKSLPDLTYGDLRKWLALDSSLLFKDLTYDPNEKVSKVEKKVFANLKSLYELRKVVETSSNGQSFERIDYDTFGYALTVYKTDEDIRRYLKKPSNLAHKVYEEDLIERLLSLSYEKFGHLSLKAIQTILPYMEDGMMYTEAVQAAGYDITGLQSAKRTLLLPTIPADITNPVVRRALTQTRKVVNAIIKRYGSPLTIHIELARELSKDHQERQQILKNQQANYERNKGAISVLVENGILNPTGYDIVRYKLWKEQGERCAYSLKVIPPSVFFGELKRERNHIPTLEVDHILPYSQSFMDNYHNKVLVYSDENQKKGNRIPSQYLMAVSPEKWTKFEEYVSSNKGFSKQKRQYLLKKDYSSRERDIVKERHLVDTRYATRFMKNFIEKTLLFKESRSSSLTKRVQTVNGKITAHFRKRWGLEKERTETYLHHALDAIVVACTDQHMVTRVTEYYQERERNVRQPYFPWPWEGFRDELLNYLNRQPDSLEISQSIKQNLFLRDYLMVSRMPKHSVTGMSHKQTIRSKACVDEKGKVKTTKRVLLQDIKFDSNGDFKMIGKEQDMATYNAIKERFLSSGGNVKSAFTEPLHKPSKKGKGNVIRKVTVEDQTKSFVRDVNGGVAENGSLVRIDLFEKEGMYYVVPIYVGDTVLKQLPIKISASNRGYYKWVELDENYRFKFSLYAHDLIRIVTKDEDRFFYFSYFDNDGNRIKFLNINSPTGKNENRYGVRSIKLIEKYNVSTLGDISLVKSEERQLFQGMKKKVLNIIN

SEQ ID NO: 197 - RNA, 17 nt, Bacillus sp.
  APG02874 crRNA repeat
gucauaguuccauuaaa

SEQ ID NO: 198 - RNA, 83 nt, Bacillus sp.
  APG02874 tracrRNA
uuugauguuccuaugauaagggccuugagcccguggcguuggggaucgccugcccguuuauacgggcuucucccuacuuacuu

SEQ ID NO: 199 - DNA, 6 bp, Artificial Sequence
  Description of Artificial Sequence: Synthetic oligonucleotide
  APG02874 and APG03031 PAM
  modified_base (1)..(4): a, c, t, g, unknown or other
nnnncc

SEQ ID NO: 200 - protein, 1068 aa, Bacillus sp.
  APG03850
MKYVLGLDIGIASCGWAVINQEKHRIEDLGVRIFDKAENPKDGKSLATPRRDARSTRRTLRRKKHRMQRIKILLVKHGLLSKTEIDHLYESATEIDVWYLRLNALERRLNPKEFARVLIHLAKRRGFKSNRKETTLSENGQILENISENLQIMEQQNYRTVGEMILKDKKFENHKRNKDGTYIGTVTRQQLKEEIQMIFNAQRLYKNDYATEEFESSYLEIWASQRPYASKDQIEKMIGYCTLEPKEKRVPKASWSFQYFVALQTINNLRLINKDRIEELSFEEKNQIMNLALEKSIVKYIDIRKLLSIPNEFHFNNLLYSADTVDTAVENKKCIEFKEYHSINKLYKQIYGKSVPNLLPIDYDTIACGLTIFKDDKDILAYLQNKYVNAKGKPISNLAKKTYDDTFIQALLTLNFSKMGHLSFKALKNIIPFLEEGLSYDKACEKAGYNFKGTSHAEKTKYLPVIPQNTNPVVHRALSQTRKVINAIIKKYGSPSAIHIETARELSKTFQERKEIDSMYQDNSKKNEHAIHKLKELGLINPSGINIVKFKLWNEQDGRCMYSGKYIEPHRLFEEGYTEVDHILPYSRSLDDSYNNKALTLGIENQRKGNKTPYEYIGKTSIWHEFETRVQSNKRINKKKQQKLLLQYFSYTREQEFIKRNLNDTRYATIYLSTLIQQHLIFSESSRKKKVHTVSGIITSHLRSRWGFNKDRKEGHIHHALDAVIVAVTSDHMIQRVTKYYKLKELNRNLQAKRMQFPEPWEGFRLELEARISPNTQQYLKRILFKNYADVNLSEIKPIFVSRMPKRSITGELHQETIRKLIGYNEKGKVLTAIKTKLEDIPFDANGDFPMYGKETDLYTYNAIKERYLSHKKDKRKSFQDPLYKPTKSGEIGPLIKSIKIMDTRTIVNPVNQGKGVVYNSKIARTDVFKKDEKYYLIPIYTIDLLKNILPQKAITAGKGYEDWTTIDPSFTFLFSLFPNDLIQIVPSKNKTIKARTTVSKKEVLLPSLTGYFKGVHSGTAGITVETHDGSVIANVGSKQLLLFEKYQVDVLGHYTKIKEEKRIGMVI

SEQ ID NO: 201 - RNA, 19 nt, Bacillus sp.
  APG03850 crRNA repeat
gcuauaguuccauaagaaa

SEQ ID NO: 202 - RNA, 115 nt, Bacillus sp.
  APG03850 tracrRNA
uuucuuaaguuacuauaguaagggcaaugacccguggcguuuggggaucgccuuauccugguauggauauucuccccaugugaaaagcaccuaagcauagcgcuauggugcuuuu

SEQ ID NO: 203 - DNA, 5 bp, Artificial Sequence
  Description of Artificial Sequence: Synthetic oligonucleotide
  APG03850 PAM
  modified_base (1)..(4): a, c, t, g, unknown or other
nnnng

SEQ ID NO: 204 - protein, 1081 aa, Bacillus sp.
  APG07553
MQYVLGLDIGIASCGWAVINQEKERIEDLGVRIFDKAENPKDGKSLAAPRRDARSTRRTLRRKKHRMQRIKILLVKHGLLSQTELDHLYESATEVDVWNLRLDAIERKLNPKEFTRVLIHLAKRRGFKSNSKETTLSENGQILESISENQQIMEQKNYKTIGEMILKDKKFENHKRNKDGTYIGTVTRQQLQDEIQIIFNAQRLYKNNYATKEFESSYLEIWASQRPYASKDQIEKMIGYCTLEQKEKRVPRASWSFQYFVALHTINNLRLISKDRIEELSFKEKKQIMNLALEKPIVKYIDIRKLLSIPNELHFNSLLYSADTVDTTVENRKCIELKEYHSINKVYKQIYGKNALNLLPIDYDTIAYGLTIFKDDKDILEHLKNKYVNAKGKPINNLAKKTYDDTFIQALLTLNFSKMGHLSFKALKNIIPFLEEGLSYDKACEKAGYNFKGTSYTEQTKYLPVIPQNTNPVVHRALSQTKKVINAIIKKYGSPNAIHIETARELSKTFQERKEIDSMYQDNSKKNEHAIHKLKELGNINPSGINIVKFKLWNEQDGKCMYSGKYIEPHRLFEEGYTEVDHILPYSRSLDDSYNNKTLTLGIENQRKGNKTPYEYMGNTSIWDEYEIRVQSNKKINKKKQQKLLLQHFSYAREQEFIERNLNDTRYATIYLSSLIQQHLIFSESSRKKKVHTVSGIITSHLRSRWGFNKDRKEGHIHHALDAVIVAVTSDHMIQRVTKYYKLKELNRNLQAKRMPFPEPWEGFRLELEARISPNTQQYLKGLRFKNYADVNLCEIKPIFVSKMPKRSITGELHQETIRKFIGYNEKGKVLTAIKTKLEDIPFDANGDFPMYGKETDLYTYNSIKERYLSHKKDKRKSFQEPLYKPTKSGGIGPLIKSIKIMDTRTIVNPVNQGKGVVYNSKIARTDVFKKDDKYYLIPIYTIDLMKNILPQKAITAGKGYEDWITIDHSFTFLFSLFPNDLIKIVPSKNKEIKARSTSSKKEILLPSLIGYFKSVHSGTAGITVESHDGRFIANVGSKQLLLFEKYQVDVLGHYTKIKEEKRIGMATCNDNKKSTAFGSL

SEQ ID NO: 205 - RNA, 16 nt, Bacillus sp.
  APG07553 crRNA repeat
gcuauaguuccauaag

SEQ ID NO: 206 - RNA, 111 nt, Bacillus sp.
  APG07553 tracrRNA
cuuaaguuacuauaguaagggcaaugacccguggcguuuggggaucgccucauccauuacggauauucuccccaugugaaaagcaccuaagcauaaggcuaaggugcuuuu

SEQ ID NO: 207 - DNA, 8 bp, Artificial Sequence
  Description of Artificial Sequence: Synthetic oligonucleotide
  APG07553 PAM
  modified_base (1)..(4): a, c, t, g, unknown or other
  modified_base (6)..(7): a, c, t, g, unknown or other
nnnngnna

SEQ ID NO: 208 - protein, 1404 aa, Chryseobacterium sp.
  APG03031
MKKTLGIDLGTNSIGWVIRNADLLDNQIEDFGVITFEKGVASEKGNEFPKVQKRTESRGKRRNYQSEKYRKFALLAFLIQKNMCPLTMDEFCNWKDYRKGKKREYPQSEEFLNWIRFDFNGDGLPDFHLFGKEKDDSYYVFRAFAADENHKNVFDNNPHILGRVLYQMVQRRGFKGRDEEEAKTMLVGSDKNGTKGRNDIEEYIEKYKTLGAALYYHQKDFGGRIKQRYNLRKDNENELKEICKIHQLSQEDYEKLWKAIIWQRPLRTQKGLVGNCIYEKNKKRVAVSHPLYEEYRTWVFINNLNIIPPFGEEKQNYISEKIYPLFYKSKPDFELSDIDKQLKKDGAKRTSKHNDKTKVLSVKLLKQFQDVFGEDWKQKLQWDINGDRNSQPEKKEKSLYTFEDLWHILLTFDGQENLKKFALEKLNLDDEKAIKFSKIKLQQGYATLSISAIKKILPYLQRGFLYSHAVYMANLYKMLGETTISETLTNHFSDEILKILENDDFNRKNSAIINSLISEMLNDDNRYYIADNRNLDKTEEQIVLKSITDNYGLETWGNFDEEKKMEIIDFVSSKYLEFLKKTYTEKGNLFIQPERIHDKIFNFLKETYHVSEDKIKYLWHPSEQENYAKADEYFEYSIGSKKYYVKEESTQNFLSRNPNAEFDGRQLKLLGNPEPLSKGFKNPMALKSLHKLKNLVNYLLQTGKIDEGTRVVIEIARELNDKNKRKAIENWQKDREKENEAFRKEIEVYKEQFPNINLIDENTLIRKIRLWHEQNKICLYTGKTIPFSELIIGNKYDFEHTIPASISFDNELKNLTISDSSYNRLYKGKKFPTQLSNYDSEQTINGESCNSILRNIEFIFGERIVEYKEIKGKTEKIVKWKKIDELEKQFDEWKKKASYASTKEIKDNCIVKYHTIKMDLDYLKSKLATFTITEYKAGWRNSQIRDTQIITKYALPYFKTLFKRVSVEKGGVTDIFKKVYKVQSRNSKKDRSVHSHHAQDAAILTLIPNAFHRERIIKAYENEIDNRTGKTYHEQPLDWENFSEKYILELQDKVLINNLTDNRTITQTYKTVRKRGKVVYDIDENGNSLKRVSKGDTIRGQLHGETFYGAIKQPVRDEDNKILFDENKKMILKDEIYLAVRKPLVYKKDANSPGFKTLDEVEKVIVDKGLFKMIKKQVEESDFKTALIDGVYMLNESGEKVNKIRRIRCFENGLKYTTAIKVHEHSFVSHKEYKQSTLATNGENTYCLFYKNDKGKAMKILSIVDLAELKLKNIQNLYNEPEFSSFEVGKGKNKYKIPLYSVLKSGDKVLFYKENIYELKDLEQKELSDRMFKMYQFEKDGRIKFRHHLAAGIDTELKKENPENSSVNFEEKQVFLRLSQGQWNFAIDGKDFEISLDGKINWKF

SEQ ID NO: 209 - RNA, 15 nt, Chryseobacterium sp.
  APG03031 crRNA repeat
guugugaauugcuuu

SEQ ID NO: 210 - RNA, 68 nt, Chryseobacterium sp.
  APG03031 tracrRNA
aaagcaauucacaauaaggcuuaaaagccgaagaaaaucuuuaguccugcguacuccgugggauuuuu

SEQ ID NO: 211 - protein, 1092 aa, Bacillus sp.
  APG09208
MRYSIGLDIGTTSIGSAVINNDLQRFEHLGVRIFDAAENPKDGSSLSAPRRLARSSRKRLRRRKHRVERTKQILINKGLLTKTQVKNLYNSKNVNLDVWDIRVSGLDRKLFNDEFARVLIHFSKNRGFKSNRKSELKEDDNGAILSAVKENKELMEEKGYRTIAEMLVLDERYEGTKRNKDGDYSHVVSRSDIENEIRLLFQKQREYGHPFAIEENEEAFLAIWSSQRPFATKDDIVKKIGTCTLEPREKRAPKSTYTFERFRALDKLNRLRILSTTTPSRPLTNEERDSILNSLFSKKEVKYKELRKMLKLTDDQRFNEIYYSPDETIEKTENRVFLSSESQYKIKKIIEKTESKNMLSTYCPIDYDTIGYALTVFKDDKDIQHYLQNRYVDSKGKAISNMANREYNLELIEELLGLSFSKFGHLSLKALNNILPYMEEGEPYHIACEMAGYQFSQRLTKEKHRLLPPIPVDEIPNPVVVRALTQVRKVLNSIIKKYGPPSDIYIELAREMGKPFKERKSLEREFNENRQVNEKAKAHISELYRVPNDPRPHDILKFKLWKEQNGICPYSFKPISVDYLFNIGYTEVDHIIPYSRSFDDSNGNKVLVLTNENRNKLNRTPYEWFGHDENRWGDFVSFVRTMKVGKKKKDMLLKKNFDEEQEEQILSRNLNDTRYITRYIKSFIEDNLEFRTEENKKQYVHTVNGGYTSLMRKRWGLNKDRRGNDLHHAVDAAIIAVSLPFKHKVNTYFKRQEIGLSNLSNNKKDIFPEPWRNFIKELEARMIQDPEKMKTALESLELETYGEIFLNKLKPIFVSRMPKHSIKGQIHEETIRRVRGLTEEGFLVTVKKTRLDQIPFDKNGDFPMYGKETDIKTYMAIKQRYLEYGQDKQKAFAIPLRKPSKNPENAPIVRSVKIEGKANRVVMLDDKAAADNASIARTEVFRHKETGEYYVTPVYVADIVSNKIPDRLITLKKPYSEWDRITDEYEYLFSLYNNDLIKIVLPKEKETKKYTGGNHLWQEGFFYFKGVDSSNASIKIIDHLNSFEVRIGIRRLIAFEKYQVNPLGEINKVHGEKRPGELLNEEEIKENRKNIS

SEQ ID NO: 212 - RNA, 23 nt, Bacillus sp.
  APG09208 crRNA repeat
gccauaauuccucuguaaaacuu

SEQ ID NO: 213 - RNA, 112 nt, Bacillus sp.
  APG09208 tracrRNA
aagguuuauagaguuauuaugguaaggcaauaugccguggcguuggggaucgccuauguccgguuuuaccggaucucccuagaggugacuaacuuugguuagucgccuuuuu

SEQ ID NO: 214 - DNA, 5 bp, Artificial Sequence
  Description of Artificial Sequence: Synthetic oligonucleotide
  APG09208 PAM
  modified_base (1)..(4): a, c, t, g, unknown or other
nnnnc

SEQ ID NO: 215 - protein, 1150 aa, Enterococcus sp.
  APG05586
MYSIGLDLGISSVGWSVIDEETGKIVDLGVRLFSAKNSEKNLERRTSRGARRLIRRKTNRLKDAKKLLEAIGFYEDKALKNVCPYQLRVKGLTEGLTKGELYKVVLHIVKKRGISYLDEDDAEAAKESQDYKEQVRKNAQLLTKYTPGQIQLQRLKENNRVKTGINGQGHYQLNVFKVSAYADELATILKTQQALYPNELTDDWIALFVQPGIAENAGLIYRKRPYYHGPGNEANNSPYGRWSDFQKTGQPAANIFDKLIGKDFQGELRASGLSLSAQQYNLLNDLTNLKIDGEVSLSPEQKEFILTELMTKEFARFGVNDIAKLLGVKKEQLSGWRLDKKGKPEIHTLKGYRNWRKIFAEAGIDLATLPTETIDCLAKVLTLNTEREGVENTLAFELPELAEPVKSLVLDHYKELSQSISTQAWHRFSLKTLHLLIPELIKSTSEQNTLLEQFQLKAGVRKRYSDYKKLPTKEVLAEIYNPTVNKTVSQAFKVMDALLEKYGKDQIHYITVEMPRDDNEEEERKRIKELQTKNSQRKNDSQQYFLQKSGWSQEKFQATIHKNRRFLAKLLYYFEQDGVCAYTGNPISPELLVSDSTEIDHIIPISISLDDSINNKVLVLSHANQVKGQQTPYDARMAGAFNKINGKFSNWDEYQKWVESRPFSRKKVNNLLETRNIFDSEQVQKFLSRNLNDTRYASRLVLNTLQSFFENQDTIVRVVNGSFTHTLRKKWGADLDKTRETHHHHAVDATLCAVTPFVKVSRYHYAVNEETGEKFMREIDVETGEILDEIPYREYKKAKHYERKTYQVKWSNFREQLKPITIHPKIKFSHQVDRKANRKLSDATIYSVREKTEVKTLKSGKEKITTDEYTIGKIKDIYTVDGWEAFKKKQDKLLMKEFDEKTYELLVTIAATTPDFQEVEEKNGKVKRVKRSPFAVYCEENGIPAIRKYAKKNNGPVIRSLKYYDGKLNKHINITKDEKGRPVEQTKNGRKVTLQSLKPYRYDIYQDLETKAYYTVQLYYSDLRFVEGEYGITEKEYMKKVAEQTKGQVVRFCFSLQKNDGLEIEWKDSQRYDVRFYNFQSANSINFKGLEQEMIPAENQFKQKPYNNGAINLNIAKYGKEGKKLRKFNTDILGKKHHLSYEKEPKNIIK

SEQ ID NO: 216 - RNA, 19 nt, Enterococcus sp.
  APG05586 crRNA repeat
guuauuguacucucaauaa

SEQ ID NO: 217 - RNA, 67 nt, Enterococcus sp.
  APG05586 tracrRNA
uuauugagaaucuacaauaauaaggcaucuugccgaauuuaccgcccuacauauguagggcgguuuu

SEQ ID NO: 218 - DNA, 5 bp, Artificial Sequence
  Description of Artificial Sequence: Synthetic oligonucleotide
  APG05586 PAM
  modified_base (1)..(2): a, c, t, g, unknown or other
nnrya

SEQ ID NO: 219 - protein, 1150 aa, Enterococcus sp.
  APG08770
MYSIGLDLGISSVGWSVIDEETGKIVDLGVRLFSAKNSEKNLERRTSRGARRLIRRKTNRLKDAKKLLEAIGFYEDKALKNVCPYQLRVKGLTEGLTKGELYKVVLHIVKKRGISYLDEDDAEAAKESQDYKEQVRKNAQLLTKYTPGQIQLQRLKENNRVKTGINGQGNYQLNVFKVSAYADELATILKTQQALYPNELTDDWIALFVQPGIAEDAGLIYRKRPYYHGPGNEANNSPYGRWSDFQKTGQPAANIFDKLIGKDFQGELRASGLSLSAQQYNLLNDLTNLKIDGEQPLSPTQKEFILTELMTKEFARFGVNDIAKLLGVKKEQLSGWRLDKKGKPEIHTLKGYRNWRKIFAEAGIDLATLPTETIDCLAKVLTLNTEREGVENTLAFELPELAEPVKSLVLDHYKELSQSISTQAWHRFSLKTLHLLIPELIKSTSEQNTLLEQFQLKAGVRKRYSDYKKLPTKEVLAEIYNPTVNKTVSQAFKVMDALLEKYGKDQIHYITVEMPRDDNEEEERKRIKELQTKNSQRKNDSQQYFLQKSGWSQEKFQATIHKNRRFLAKLLYYFEQDGVCAYTGNPISPELLVSDSTEIDHIIPISISLDDSINNKVLVLSHANQVKGQQTPYDAWMAGAFKKINGKFSNWDEYQKWVESRPFSRKKANNLLETRNIFDSEQVQNFLSRNLNDTRYASRLVLNTLQSFFENQDTIVRVVNGSFTHTLRKKWGADLDKTRETHHHHAIDASLCAVTPFVKVSRYHYAVNEETGEKFMREIDVETGEILDEIPYREYKKAKHYERKTYQVKWSNFREQLKPLTIHPKIKFSHQVDRKANRKLSDATIYSVREKTEVKTLKSGKEKITTDEYTIGKIKDIYTVDGWEAFKKKQDKLLMKEFDEKTYELLVTIAATTPDFQEVEEKNGKVKRVKRSPFAVYCEENGIPAIRKYAKKNNGPVIRSLKYYDGKLNKHINITKDEKGRPVEQTKNGRKVTLQSLKPYRYDIYQDLETKAYYTVQLYYSDLRFVEGEYGITEKEYMKKVAEQTKGQVVRFCFSLQKNDGLEIEWKDSQRYDVRFYNFQSANSINFKGLEQEMMPAENQFKQKPYNNGAINLNIAKYGKEGNKLRKFNTDILGKKHHLSYEKEPKNIIK

SEQ ID NO: 220 - RNA, 19 nt, Enterococcus sp.
  APG08770 crRNA repeat
guuauuguacucucaauaa

SEQ ID NO: 221 - RNA, 67 nt, Enterococcus sp.; identical to SEQ ID NO: 217
  APG08770 tracrRNA

SEQ ID NO: 222 - protein, 1053 aa, Staphylococcus sp.
  APG08167
MKRHYILGLDIGITSVGYGIIDYETREVIDAGVRLFKEANVENNEGRRSKRGARRLKRRRKHRLQSVKKLLFDYDLLTNHSELSGINPYEARVKGLSQNLSEVEFSGALLHLAKRRGVHNVNEVEEDTRNELSTKEQISRNSKALEEKYVAELQLERLKTDSEVRGAINRFKTSDYVKEAKQLLKVQKEYHQLDQSFIDTYIDLLETRRTYYEGPGKGSPFGWKDIKEWYEMLIGHCTYFPEELRSVKYAYNADLYNALNDLNNLVISRDDNEKLAYYEKFQIIENVFKQKKKPTLKQISKEIFVNEEDIKGYRVTSTGKPEFTKFKIYHDIKGIKERKEIIENAEVLDQIAEILTIYQSSEDIQEELAKLNSELTQEEIEQISKLTGYTGTHSLSLKAINLILDELWHTSDNQMAIFNRLKLVPKKMDLSQQKEIPTTLVDDFILSPVVKRSFIQSIKVINAIIKKYGLPSDIIIELAREKNSKDAQKLINEMQKRNRQTNERIEEIIRTTGKENAKYLIEKIKLHNMQEGKCLYSLEAIPLEDLLNNPFNYEVDHIIPRSVSFDNSFNNKVLVKQEENSKKDNRTPFQYLSSSDSKMDYETFKKHILNLSKGKDRISKKKKVYLLEERDINRFSVQKDFINRNLVDTRYATRELMTLLRSYFSVNNLDVKVKSINGGFTSFLRRKWKFKKERNQGYKHHAEDALIIANADYVFKEWKKLDRANKVMENQTVEENQAESMPEIETEQEYKEIFITPHQIQHIKDFKDYKYSHRVDKKSNRELVNDTLYSTRKDDKGNTLIVNNLNGLYDKDNDKLKKLMNQSPEKLLMYHHDPQTYQKLKLIMEQYGGEKNPLYKYHEETGNYLTKYSKKDNGPVIKKIKYYGNKLNVHLDITDDYPNSRNKVVKLSLKPFRFDVYLDNGVYKFVTIKNLDVIKKEDYYEVNSKCYKEAKKLKQISDQAEFIASFYNNDLIKVNGELYRIIGVNNDLLNRIEVNMVDITYKEYLETMNDKRTPRIFKAITGKTQSIKKYSTDILGNLYEVKSKQNPQMIMKR

SEQ ID NO: 223 - RNA, 17 nt, Staphylococcus sp.
  APG08167 crRNA repeat
guuuuaguacucuguaa

SEQ ID NO: 224 - RNA, 64 nt, Staphylococcus sp.
  APG08167 tracrRNA
uuacagaaucuacuaaaacaagacuauauaucguguuuaucccaucaauuuauugaugggauuu

SEQ ID NO: 225 - DNA, 5 bp, Artificial Sequence
  Description of Artificial Sequence: Synthetic oligonucleotide
  APG08167 PAM
  modified_base (1)..(2): a, c, t, g, unknown or other
nngrr

SEQ ID NO: 226 - protein, 1052 aa, Staphylococcus sp.
  APG01604
MVTKYILGLDIGITSVGYGIINYEDKTIIDAGVRLFPEANVENNEGRRSKRGARRLKRRRIHRLDRIKQLLSEYNLVDLDNIPQSPSPYEIRVKGLREELSKDELVIALLHIAKRRGIHNVEAVDETQDEGNELSTKEQLAKNNNLLKDKYVCELLLERLKDGKVRGEKNRFKTTDIIKEVKQLLETQKEAHQLDDDFINRYIDLIETRREYFEGPGKGSPFGWGGDLKKWYETLMGHCTYFPNELRSVKYSYSADLFNALNDLNNLVIQREGNSKLEYHEKYHIIENVFKQKKKPTLKQIANEIGVSPDDIKGFRINKSGKETFTEFKLYHDLKKVLIDQSILENVQLLDQIAEILTIYQDKESIINELNQLSEIINEQDKESISNLSGYNGTHRLSLKCINLVIEELWHTSRNQMEIFTYLNIKPKKIDLAKTNKIPKNMIDEFILSPVVKRTFGQAINVINKVIEKYGVPEDIIIELARESNSKDKQKFINSLQKKNETTRKRINEIIGQYGNQNAKRLVEKIRLHDEQEGKCLYSLESIPLEDLINNPQYYEVDHIIPRSVSFDNSYQNKVLVKQTENSKKSNRTPYQYFNSGETKLSYNQFKQHVLNLSKSKDRISKKKKEYLLEERDINKYEVQKEFINRNLVDTRYATRELTNYLKAYFSANDMDVKVKTINGSFTDYLRKVWKFKKERNHGYKHHAEDALIIANADFLFKENKKLKKANAILEQPSLDNGKSDATVENDNEYVETFSIPKQVNDIKEFRDFKFSHRVDKKPNRQLINDTLYSTRKIENHTFIVSPITNIYSKDNDELKKKFNKNPEKFLMYQHDPKTFEKLEVIMKQYANEKNPLAKYHEETGEYLTKYSKKNNGPIVKTIKVLGDKVGKHLDVTHKYKYSNSKIVKKTINPYRFDVYLTDKGYKFITISYLDVLKKDNYYYILKEKYEELKIKKSISDTDQFIGSFYYNDLIKINDQIFKVVGVNNDLLNRIELDLLDISYKEYCKINNIKTNRIIKGITKKITNIEKFSTDVLGNLYKAHSNHPQLIFKQRD

SEQ ID NO: 227 - RNA, 17 nt, Staphylococcus sp.
  APG01604 crRNA repeat
guuuuaguacucuguaa

SEQ ID NO: 228 - RNA, 64 nt, Staphylococcus sp.; identical to SEQ ID NO: 224
  APG01604 tracrRNA

SEQ ID NO: 229 - protein, 1129 aa, Streptococcus sp.
  APG03021
MSNGKILGLDIGVASVGVGIIDAKTGNVIHANSRLFSAANAENNAERRGFRGARRLTRRKKHRVKRVRDLFEKYDISTDFRNLNLNPYELRVKGLTEQLTNEELFAALRTIAKRRGISYLDDAEDDSTGSSDYAKSIDENRRLLKTKTPGQIQLERLEKYGQLRGNFTVYDENGEAHRLINVFSTSDYKNEARKILEAQSNYNKQITDEFIEDYIEILTQKRKYYHGPGNEKSRTDYGRFRTDGTTLENIFGILIGKCSFYPEEYRASKASYTAQEFNFLNDLNNLKVPTETGKLSTEQKEYLVDFAKKSKALGASKLLKEIAKIVDCSVDDIKGYRVDNKDKPDLHTFEPYRKLKFNLSSIDIDELSRETLDKLADILTLNTEREGIEDTIKRNLPSQFTEEQISEIVQIRKNQSSAFNKGWHSFSAKLMNELIPELYVTSEEQMTILTRLEKFKVNKKSSKNTKTIDEKEITDEIYNPVVAKSVRQTIKIINAAVKKYGDFDKIVIEMPRDKNAEDEKKFIDKKEKENKKEKDDSLKRAAFLYNGTDNLPDGVFHGNKELKTKIRLWYQQGERCLYSGKLISIHDLVHNSNKFEIDHILPLSLSFDDSLANKVLVYAWTNQEKGQKTPYQVIDSMDAAWSFREMKDYVLKQKRLGKKKREYLLTTENIDKIEVKKKFIERNLVDTRYASRVVLNSLQTALKELGKDTKVSVVRGQFTSQLRRKWNIDKSRETYHHHAVDALIIAASSQLKLWQKQENPMFESYGENQVVNKETGEILSISDDKYKELVFQPPYQGFVNTISSKGFEDEILFSYQVDSKFNRKVSDATIYSTRKAKLGKDKKDETYVLGKIKDIYSQDGFDTFIKRYKKDKTQFLMYQKDPLTWENVIEVILRDYPSEKLSEDGKKTVKCNPFEEYRRENGLICKYSKKGNGTPIKSLKYYDKKLGNCIDITPEKSKNRVVLRQISPWRADIYFNLETLKYELMGLKYSDLSFEKGTGKYHISQEKYDAIREKEGIGKKSEFKFTLYRNDLILIKDTLNNCERMLRFGSKNDTSKHYVELKPLEKGTFDSEEEILPVLGKVAKSGQFIKGLNKTNISIYKVRTDVLGNKFFIKKEGDKPKLDFKNNNK

SEQ ID NO: 230 - RNA, 16 nt, Streptococcus sp.
  APG03021 crRNA repeat
guauuuguacucucaa

SEQ ID NO: 231 - RNA, 68 nt, Streptococcus sp.
  APG03021 tracrRNA
uugcagagccuacaaauauaaggcuucaugccgaauucaagcaccccauguuuacauggggugcuuuu

SEQ ID NO: 232 - DNA, 6 bp, Artificial Sequence
  Description of Artificial Sequence: Synthetic oligonucleotide
  APG03021 PAM
  modified_base (1)..(3): a, c, t, g, unknown or other
nnnaaa

SEQ ID NO: 233 - protein, 1359 aa, Pediococcus sp.
  APG06015
MEKVPYNIGLDIGTSSIGFAATDNLNKPIRAKGKTVIGVRLFEEGKTAADRRGFRTTRRRLSRRKWRLRLLDEIFDKEMAKVDNTFFARLKESNLSPKDANKKYLGSLLFPEKKDFKFYEDYPTIYHLRYALMHEKRQFDIREVYLAMHHIIKYRGNFLNSAPMNSFKTQDFDFVAKFKKLNELFESIDAEHETKFDIENISKFRDIMLNQDIRKLDRKKQAAKILILDSTDKTAKKINNKIATAVANSALGYKFALDAILKLDVEESKDWSISLNDEEIDSILDNLTSDLDAERIEIIEILRDLYSHIALNEIVPNGQSLSKSMMDKYDKHHADLDVLKKVISNMDDRKKAKSLKNIYNQYVGKTNDKVLDKDEFYKQIQKNLDKSEDAMKIVNEIELDQFMPKQRTSQNGVIPHQLHQKELDEIIENQKQYYPFLAEPNPNEKRKPHAQFKLDELIAFKIPYYVGPLITKEEQQAQSGAKFAWMKRKQDGVITPWNFDEKVDRMASANEFIRRMTTKDTYLLGEDVLPDESLIYQKFKVLNELNNVKVNDKKLTVADKQDIFNDLFKKQKTVSVSKLQKYFVTEKHYLTEPTIKGLSDTKKFSNSLSTYIDFEKIFGNEILADQNKQNDLEKIIEWSTIFEDRKIFEDKLHEIEWLTEKQIKAIRRYRGWGRLSKKLLVDLRNNEGKSILDELWRTNDNFMQIQAREEFAKSIVEANQKLMNLGGAASVQNTVESTLEDAYTSPQNKKAIRQVIKVVEDIVKAVGYAPEKITIEFTRGADKNSRRTQNRQKQIMEVYKTAAKEIVDATLKGQLENEEKLTDKLYLYFTQLGKDIYSGETINIDQLNNYDIDHILPQAFIKDDSLDNRVLTSRDLNNGKSDSVPVKQFGANMKSFWMRLQAHGLISKRKLNNLMTDPDSIGKYTMQGFVRRQLVETSQVIKLTANILGAVYGENTDIVEIPAKLTHQMREKFNLYKVREVNDYHHAFDAYLTTFVGNYLFKRYPKLRPYFVYGDFKMTDNALKGMRRFNFLHDLKDDEVLVDNETGEVLWEGQKSIEELKKIYGYKFMLTTHEAYINNGAMYDQTVYPAKSNKKLIPSKNNRPTNIYGGFSGNKDAYLAIVKILGKKGDTYKVVGVPRRFSDELLNAYNDDYSEYLNKLHDVLVTQFTKKQRNKKTGKIIKKIENFEIVVGKVNYRQRIIDRNQSFMLGSSTYKYNTKQLVLTESSMKILSNFKHASDDNLNLVYDEILEKVNESFELYDKNGFRKKLNNNIDKFRKLPCKSIFEKNKLISVGKCEILFQILNGLHANATMGDLKGIGFSTPFGFMQDASGIKLNKDSMLLYQSPTGLFERKVKLSDL

SEQ ID NO: 234 - RNA, 14 nt, Pediococcus sp.
  APG06015 crRNA repeat
guuucagaagagug

SEQ ID NO: 235 - RNA, 111 nt, Pediococcus sp.
  APG06015 tracrRNA
cauucuguuuugaaaucaaacaacgcuuuacgcggaguuuacacaucugucccauuauaugggcauuacauaauaaaagaggaaucaccuuuaagguugauuccucuuuuu

SEQ ID NO: 236 - DNA, 5 bp, Artificial Sequence
  Description of Artificial Sequence: Synthetic oligonucleotide
  APG06015 PAM
  modified_base (1)..(2): a, c, t, g, unknown or other
nnaaa

SEQ ID NO: 237 - protein, 1488 aa, Weissella sp.
  APG09344
MAKQKYTVGLDIGTNSVGWAVINKDFKLVSGKKHINDNGKQKRSRTNLWGVRLFDAADTAADRRLKRGMRRRIARRKERLNYLRGIFQADILAFDDSFFIRMDESFLQDDDKQATAFSYRDQSGAMQTRVVTEKEAVKYPLFNGKSGSGETYTDESAYYNQYPTIYHLRQRLIDNPAQADLRLVYLAMHHILKYRGHFVNQGQTFDLGNINIAGNLTSALDKLDEASSFKFGLADVDADQANAILKNKQWSASKKAYELNTLYEIIQDTVYRRENETQAVAYDSLTVKQQEKWLAEKQKQVKAFLTGIVGNTISPKDIFANKDYDRKQNEDFPEKIKYSNENFEEQIGELEKYLDETEVAAIVAGKDVYESLVLSNILTKSTLSGSMIEKYNVHGTQLKSLKSFSRKVSAEFYDKLFNVVKDEKGKPQIGVYAQYIDGVGNPAKRLAREDFYDALKKVFESEFKGLTFPAGEKGIDFTKTDLSADRMAFIREMNEAINLENYLPKQRQADNGAIPYQVHEHELIRIIENQKQYYPFLGDKVQVTYEDESGQTQVRSEYKIQVLFKFRIPYYVGTLAKNSGWVNEDGKKLVARNVAAKNSWVVRNSDERVTPWNFEQVINKEASSINFIERMTNFDTYLPNEKVLPKNSLLYQEFIVNNELISSGYYLNGRKEYFLPEQRQRIITRLFKRYRKVSAKQMLDFLKNEYQIKLDDDPKKLFGLDTFVKVPSYNGSLSTVVDLTNKMGISEDLIANYPERFEEIIKWQTIFEDKKILKKTIREVNHNKWSGMLTAEQVNKLSKRHYTGWGRLSQKLLDGVKTSQGRTIIESLREGICDNFMRLIEDEKIAEFIANAQVAGAKDGVLAYDLVDQLPGSPAIKKGIWQSLRVLQELEHYLGRDAIGKVVIEMSRDDESSRRTKARKQQLEEFYKKFKESTGSDVTAELKRELSEKDAKEIDDEKVFLYFLQNGKSMYSGDQLYLSRLADYQVDHIVPQTYIKDDSLDNKVLVTQRDNQNKGGDTPSHTVVTRMNSYWDMLAKNGQVSPRKLANLKKGTITLKQREGFINRQLVENRQIIKHVANILTNYYTGTDTLVLTPKSGLTSQLRSGLIYELNPAFDEAKALDRGKAYQVERYTTVKLHDRFVKNRKLNDYHHAHDAYLNAFVAQYVYQEHPEWKNAWVYGKYPRNGQADFGKWATQRKQKSLQLLSSMANDVWNLEDPDTMEKTILNRDETFEQMRQTLCYRNINIVKKLETQTGKFGDESVYKKGNKADHYSLGLKRKYPPQKYGGTKGAISAVTALVKDNSGRVIPVSISASDYDSYQNASDKLAWLLMRKKNIAEILVASLPKYTKYELPSGALRLLASYQEAQSAVELPMLNLGLMDDEAKVLNLYDQLAQFIADNKLFTDKKIALLKGEMRVAFEGLEEFKDKQKVIDELLGVTNGSNQGLQALNSIGLGTSNQRLKSGNTMTNGVTLINESVTGLYSTRTTYN

SEQ ID NO: 238 - RNA, 22 nt, Weissella sp.
  APG09344 crRNA repeat
guuuuagugucauguugaauag

SEQ ID NO: 239 - RNA, 70 nt, Weissella sp.
  APG09344 tracrRNA
cuauucaacauggcaaguuaaaauaagcuuuaugcguauucaaacuuuuguuaaggcgacaucgccuuuu

SEQ ID NO: 240 - DNA, 3 bp, Artificial Sequence
  Description of Artificial Sequence: Synthetic oligonucleotide
  APG09344 PAM
  modified_base (1)..(1): a, c, t, g, unknown or other
nag

SEQ ID NO: 241 - protein, 1337 aa, Enterococcus sp.
  APG07991
MKKDYVIGLDIGTNSVGWAVMTEDYQLVKKKMPIYGNTEKKKIKKNFWGVRLFEEGHTAEDRRLKRTARRRISRRRNRLRYLQAFFEEAMTALDENFFARLQESFLVPEDKKWHRHPIFAKLEDEVAYHETYPTIYHLRKKLADSSEQADLRLIYLALAHIVKYRGHFLIEGKLSTENISVKEQFQQFMIIYNQTFVNGESRLVSAPLPESVLIEEELTEKASRTKKSEKVLQQFPQEKANGLFGQFLKLMVGNKADFKKVFGLEEEAKITYASESYEEDLEGILAKVGDEYSDVFLAAKNVYDAVELSTILADSDKKSHAKLSSSMIVRFTEHQEDLKNFKRFIRENCPDEYDNLFKNEQKDGYAGYIAHAGKVSQLKFYQYVKKIIQDIAGAEYFLEKIAQENFLRKQRTFDNGVIPHQIHLAELQAIIHRQAAYYPFLKENQKKIEQLVTFRIPYYVGPLSKGDASTFAWLKRQSEEPIRPWNLQETVDLDQSATAFIERMTNFDTYLPSEKVLPKHSLLYEKFMVFNELTKISYTDDRGIKANFSGKEKEKIFDYLFKTRRKVKKKDIIQFYRNEYNTEIVTLSGLEEDQFNASFSTYQDLLKCGLTRAELDHPDNAEKLEDIIKILTIFEDRQRIRTQLSTFKGQFSEEVLKKLERKHYTGWGRLSKKLINGIYDKESGKTILDYLIKDDGVSKHYNRNFMQLINDSQLSFKNAIQKAQSSEHEETLSETVNELAGSPAIKKGIYQSLKIVDELVAIMGYAPKRIVVEMARENQTTSTGKRRSIQRLKIVEKAMAEIGSNLLKEQPTTNEQLRDTRLFLYYMQNGKDMYTGDELSLHRLSHYDIDHIIPQSFMKDDSLDNLVLVGSTENRGKSDDVPSKEVVKKMKAYWEKLYAAGLISQRKFQRLTKGEQGGLTLEDKAHFIQRQLVETRQITKNVAGILDQRYNAKSKEKKVQIITLKASLTSQFRSIFGLYKVREVNDYHHGQDAYLNCVVATTLLKVYPNLAPEFVYGEYPKFQAFKENKATAKAIIYTNLLRFFTEDEPRFTKDGEILWSNSYLKTIKKELNYHQMNIVKKVEVQKGGFSKESIKPKGPSNKLIPVKNGLDPQKYGGFDSPVVAYTVLFTHEKGKKPLIKQEILGITIMEKTRFEQNPILFLEEKGFLRPRVLMKLPKYTLYEFPEGRRRLLASAKEAQKGNQMVLPEHLLTLLYHAKQCLLPNQSESLAYVEQHQPEFQEILERVVDFAEVHTLAKSKVQQIVKLFEANQTADVKEIAASFIQLMQFNAMGAPSTFKFFQKDIERARYTSIKEIFDATIIYQSTTGLYETRRKVVD

SEQ ID NO: 242 - RNA, 17 nt, Enterococcus sp.
  APG07991 crRNA repeat
guuuuagagucauguug

SEQ ID NO: 243 - RNA, 68 nt, Enterococcus sp.
  APG07991 tracrRNA
caacauagcaaguuaaaauaagguuuuaaccguaaucaacuguaaaguggcgcuguuucggcgcuuuu

SEQ ID NO: 244 - DNA, 3 bp, Artificial Sequence
  Description of Artificial Sequence: Synthetic oligonucleotide
  APG07991 PAM
  modified_base (1)..(1): a, c, t, g, unknown or other
ngg

SEQ ID NO: 245 - protein, 1340 aa, Enterococcus sp.
  APG01868
MKKEYTIGLDIGTNSVGWSVLTDDYRLVSKKMKVAGNTEKSSTKKNFWGVRLFDEGQTAEARRSKRTARRRLARRRQRILELQKIFAPEILKIDEHFFARLNESFLVPDEKKQSRHPVFATIKQEKSYHQTYPTIYHLRQALADSSEKADIRLVYLAMAHLLKYRGHFLIEGELNTENSSVTETFRQFLSTYNQQFSEAGDKQTEKLDEAVDCSFVFTEKMSKTKKAETLLKYFPHEKSNGYLSQFIKLMVGNQGNFKNVFGLEEEAKLQFSKETYEEDLQELLEKIGDDYIDLFVQAKNVYDAVLLSEILSDSTKNTRAKLSAGMIRRYDAHKEDLVLLKRFVKENLPKKYRAFFGDNSVNGYAGYIEGHATQEDFYKFVKKELTGIRGSEVFLTKIEQENFLRKQRTFDNGVIPHQIHLTELRAIIANQKKHYPFLKEEQEKLESLLTFKIPYYVGPLAKKQENSPFAWLIRKSEEKIKPWNLPEIVDMEDSAVRFIERMINTDMYMPHNKVLPKNSLLYQKFSIYNELTKVRYQDERGQMNYFSSIEKKEIFHELFEKNRKVTKKDLQEFLYLKYDIKHAELSGIEKAFNASYTTYHDFLTMSENKREMKQWLEDPELASMFEEIIKTLTVFEDREMIKTRLSHHEATLGKHIIKKLTKKHYTGWGRLSKELIQGIRDKQSNKTILDYLINDDDFPHHRNRNFMQLINDDSLSFKKEIKKAQMITDTENLEEIVKELTGSPAIKKGILQSLKIVDEIVGIMGYEPANIVVEMARENQTTGRGLKSSRPRLKALEESLKDFGSQLLKEYPTDNSSLQKDRLYLYYLQNGRDMYTGAPLDIHRLSDYDIDHIIPRSFTTDNSIDNKVLVSSKENRLKKDDVPSEKVVKKMRSFWYDLYSSKLISKRKLDNLTKIKLTEEDKAGFIKRQLVETRQITKHVAGILHHRFNKAEDTNEPIRKVRIITLKSALVSQFRNRFGIYKVREINEYHHAHDAYLNGVIALALLKKYPQLAPEFVYGEYLKFNAHKANKATVKKEFYSNIMKFFESDTPVCDENGEIFWDKSKSIAQVKKVINHHHMNIVKKTEIQKGGFSKETVEPKKDSSKLLPRKNNWDPAKYGGLGSPNVAYTVAFTYEKGKARKRTNALEGITIMEREAFEQSPVLFLKNKGYEQAEIEMKLPKYALFELENGRKRMVASNKEAQKANSFLLPEHLVTLLYHAKQYDEISHKESFDYVNEHHKEFSEVFARVLEFAGKYTLAEKNIEKLEKIYKENQTDDLAKLASSFVNLMQFNAMGAPADFKFFDVTIPRKRYTSLTEIWQSTIIHQSITGLYETRIRMGK

SEQ ID NO: 246 - RNA, 15 nt, Enterococcus sp.
  APG01868 crRNA repeat
guuuuagagcuaugc

SEQ ID NO: 247 - RNA, 70 nt, Enterococcus sp.
  APG01868 tracrRNA
gcauagcaaguuaaaauaaggcuuuguccgucaucagcuuuuuuaaagcagcgcuguucucggcgcuuuu

SEQ ID NO: 248 - protein, 1327 aa, Enterococcus sp.
  APG02998
MKKNYTIGLDIGTASVGWAVLTEDYDLVKRKMKISGNTQKKAVKKNFWGVRLFEQGETAEGRRLKRTTRRRIARRRQRIQYLRTIFDEAMNQVDANFFARLDESFSITDEKENERHPIFGNVAEEVAYHEQFRTIYRLREVLANSSEQADLRLIYLALAHIIKFRGHFLIEGELNTENSSVSGTFEQFIKVYNETFNVEKVLELTVDLDEIAKQKVSRMKRAELILSLFPEEKSTGDFAQFIKMIVGNQGNVKKTFSLNEDAKIQFSKEEYEENLETLLAEIGEDFRGVFDAAKSVYDAISLANILKVTDAATRAKLSSSMVARFKEHKEDLKALKQFVRDNLPDEYDDLFKNKKVAGYAGYIDGDATQEEFYKYLKKALAKTTGAEYFLAKIEQEDFLRKQRTFDNGVIPYQLHLEELKAIIRNQKPYYPFLDEEKISQLMTFRIPYYVGPLAQGQGNFAWLTRKESGKITPWNLNEKVDIEKSATDFVERMTNNDSYLPMEKVLPKHSLLYEKFTVYNELTKVRYMDDNGRVQNFSSKEKQQIVNDLFKQQRKVKKEILEAFIKNEYGIENPKVEGIEKAFNASLGTYHDLVKLGIRPALFEQPEYEQQFEQIVKILTVFEDRKMRRKQLEQFSDLLTEDEQKQLERKHYKGWGRLSAKLIHGIVDQKTQKTILDYLIDDDDLPRNRNRNFMQLINDENLSFKEEIEKIAFDNDKSTEEIVQELAGSPAIKKGILQSLKIVEEIIEIMGELPTNIVVEMARENQTTAQGNRASQARMKYLEESIKKLGSSILEDEPISKDANLLRNDRLFLYYLQNGRDMYTGDELDINNLSSYDIDHIIPQSFVKDDSIDNRVLTTQRINRGKSNTVPAESVVKDMRATWERLYASNLISKKKLNNLMKAVNGGLTEEDKAYFIQRQLVETRQITKNVAQILHQKYNNEQSSEKPVRVVTLKSALASQFRKDFSLYKIRELNDYHHAQDAYLNGVIAQALLKVYPKLEPEFVYGEYQKVSIRALNKATAKKETYSNIMKFFTNDEVLTNKETGEVLWNRQRDIKTIKKVMNYHQMNIVKKVEIQTGRFTKESIQPKGPSKKLIARKNNWAPVNYGGFDSPTVAYSVIITHEKGKAAKVVQQLVGIKILERQAFEQNEVAFLEGKGFIHPKVQLKLPKYSLYQFADGRRRLLASADEAQKGNQMVLPTELIELLYHAKHVNDSSGESLTYLENHRTKFAELLEVILQFTNRYVGAEDRQKTVRDLYEKNQDADMKELAPSFVQLLQLNKQGAPASFKFFGETIERSRYKNMTELNKATFINQSITGLYETQRRLV

SEQ ID NO: 249 - RNA, 15 nt, Enterococcus sp.
  APG02998 crRNA repeat
guuuuagagcuaugc

SEQ ID NO: 250 - RNA, 66 nt, Enterococcus sp.
  APG02998 tracrRNA
gcauagcaaguuaaaauaaggcuuaguccguaaacaaacuuuggcacuguauucggugcuuuuuuu

SEQ ID NO: 251 - protein, 1150 aa, Artificial Sequence
  Description of Artificial Sequence: Synthetic polypeptide
  APG09298
MYSIGLDLGISSVGWSVIDEETGKIVDLGIRLFSAKNSEKNLERRTSRGARRLIRRKTNRLKDAKKLLEAIGFYEDKALKNVCPYQLRVKGLTEGLTKGELYKVVLHIVKKRGISYLDEDDAEAAKESQDYKEQVRKNAQLLTKYTPGQIQLQRLKENNRVKTGINGQGHYQLNVFKVSAYADELATILKTQQALYPNELTDDWIALFVQPGIAENAGLIYRKRPYYHGPGNEANNSPYGRWSDFQKTGQPAANIFDKLIGKDFQGELRASGLSLSAQQYNLLNDLTNLKIDGEVSLSPTQKEFILTELMTKEFARFGVNDIAKLLGVKKEQLSGWRLDKKGKPEIHTLKGYRNWRKIFAESGIDLATLPTETIDCLAKVLTLNTEREGVENTLAFELPELAEPVKLLVLDRYKELSQSVSTQAWHRFSLKTLHLLIPELIKSTSEQNTLLEQFQLKADVRKRYSDYKKLPTKEVLTEIYNPTVNKTVSQAFKVMDALLEKYGKDQIHYITVEMPRDDNEEEERKRIKELQTKNSQRKNDSQQYFLQKSGWSQEKFQATIHKNRRFLAKLLYYFEQDGVCAYTGNPISPELLVSDSTEIDHIIPISISLDDSINNKVLVLSHANQVKGQQTPYDARMAGAFNKINGKFSNWDEYQKWVESCPFSRKKVNNLLETRNIFDSEQVQKFLSRNLNDTRYASRLVLNTLQSFFENQDTIVRVVNGSFTHTLRKKWGADLDKTRETHHHHAVDATLCAVTPFVKVSRYHYAVNEETGEKFMREIDVETGEILDEIPYREYKKAKHYERKTYQVKWSNFREQLKPITIHPKIKFSHQVDRKANRKLSDATIYSVREKTEVKTLKSGKEKITTDEYTIGKIKDIYTVDGWEAFKKKQDKLLMKEFDEKTYELLVTIAATTPDFQEVEEKNGKVKRVKRSPFAVYCEENGIPAIRKYAKKNNGPVIRSLKYYDGKLNKHINITKDEKGRPVEQTKNGRKVTLQSLKPYRYDIYQDLETKAYYTVQLYYSDLRFVEGEYGITEKEYMKKVAEQTKGQVVRFCFSLQKNDGLEIEWKDSQRYDVRFYNFQSANSINFKGLEQEMIPAENQFKQKPYNNGAINLNIAKYGKEGNKLRKFNTDILGKKHHLSYEKEPKNIIK

SEQ ID NO: 252 - RNA, 19 nt, Enterococcus sp.
  APG05586 crRNA repeat
guuauuguacucucaauaa

SEQ ID NO: 253 - RNA, 67 nt, Enterococcus sp.; identical to SEQ ID NO: 217
  APG05586 tracrRNA

SEQ ID NO: 254 - DNA, 5 bp, Artificial Sequence
  Description of Artificial Sequence: Synthetic oligonucleotide
  APG05586 PAM
  modified_base (1)..(2): a, c, t, g, unknown or other
nnrya

SEQ ID NO: 255 - protein, 1150 aa, Artificial Sequence
  Description of Artificial Sequence: Synthetic polypeptide
  APG06251
MYSIGLDLGISSVGWSVIDEETGKIVDLGIRLFSAKNSEKNLERRTSRGARRLIRRKTNRLKDAKKLLEAIGFYEDKALKNVCPYQLRVKGLTEGLTKGELYKVVLHIVKKRGISYLDEDDAEAAKESQDYKEQVRKNAQLLTKYTPGQIQLQRLKENNRVKTGINGQGHYQLNVFKVSAYADELATILKTQQALYPNELTDDWIALFVQPGIAENAGLIYRKRPYYHGPGNEANNSPYGRWSDFQKTGQPAANIFDKLIGKDFQGELRASGLSLSAQQYNLLNDLTNLKIDGEVSLSPTQKEFILTELMTKEFARFGVNDIAKLLGVKKEQLSGWRLDKKGKPEIHTLKGYRNWRKIFAESGIDLATLPTETIDCLAKVLTLNTEREGVENTLAFELPELAEPVKLLVLDRYKELSQSVSTQAWHRFSLKTLHLLIPELIKSTSEQNTLLEQFQLKADVRKRYSDYKKLPTKEVLTEIYNPTVNKTVSQAFKVMDALLEKYGKDQIHYITVEMPRDDNEEEERKRIKELQTKNSQRKNDSQQYFLQKSGWSQEKFQATIHKNRRFLAKLLYYFEQDGVCAYTGNPISPELLVSDSTEIDHIIPISISLDDSINNKVLVLSHANQVKGQQTPYDARMAGAFNKINGKFSNWDEYQKWVESCPFSRKKVNNLLETRNIFDSEQVQKFLSRNLNDTRYASRLVLNTLQSFFENQDTIVRVVNGSFTHTLRKKWGADLDKTRETHHHHAIDASLCAVTPFVKVSRYHYAVNEETGEKFMREIDVETGEILDEIPYREYKKAKHYERKTYQVKWSNFREQLKPITIHPKIKFSHQVDRKANRKLSDATIYSVREKTEVKTLKSGKEKITTDEYTIGKIKDIYTVDGWEAFKKKQDKLLMKEFDEKTYELLVTIAATTPDFQEVEEKNGKVKRVKRSPFAVYCEENGIPAIRKYAKKNNGPVIRSLKYYDGKLNKHINITKDEKGRPVEQTKNGRKVTLQSLKPYRYDIYQDLETKAYYTVQLYYSDLRFVEGEYGITEKEYMKKVAEQTKGQVVRFCFSLQKNDGLEIEWKDSQRYDVRFYNFQSANSINFKGLEQEMIPAENQFKQKPYNNGAINLNIAKYGKEGNKLRKFNTDILGKKHHLSYEKEPKNIIK

SEQ ID NO: 256 - protein, 1150 aa, Artificial Sequence
  Description of Artificial Sequence: Synthetic polypeptide
  APG03066
MYSIGLDLGISSVGWSVIDEETGKIVDLGIRLFSAKNSDNNEGRRSKRGSRRLKRRRIHRLERVKLLLTEYDLINKEQIPTVCPYQLRVKGLTEGLTKGELYKVVLHIVKKRGISYLDEDDAEAAKESQDYKEQVRKNAQLLTKYTPGQIQLQRLKENNRVKTGINGQGHYQLNVFKVSAYADELATILKTQQALYPNELTDDWIALFVQPGIAENAGLIYRKRPYYHGPGNEANNSPYGRWSDFQKTGQPAANIFDKLIGKDFQGELRASGLSLSAQQYNLLNDLNNLIIDGEVSLSPTQKEFILTELMTKEFARFGVNDIAKLLGVKKEQLSGWRLDKKGKPEIHTLKGYRNWRKIFAESGIDLATLPTETIDCLAKVLTLNTEREGVENTLAFELPELAEPVKLLVLDRYKELSQSVSTQAWHRLSLKCIHLINEELIKSTSEQNTLLEQFQLKADVRKRYSDYKKLPTKEVLTEIYNPTVNKTVSQAFKVMDALLEKYGKDQIHYITVEMPRDDNEEEERKRIKELQTKNSQRKNDSQQYFLQKSGWSQEKFQATIHKNRRFLAKLLYYFEQDGVCAYTGNPISPELLVSDSTEVDHIIPRSISLDDSINNKVLVLSHANQVKGQQTPYDARMAGAFNKINGKFSNWDEYQKWVESCPFSRKKVNNLLETRNIFDSEQVQKFLSRNLVDTRYATRLVLNTLQSFFENQDTIVRVVNGSFTHTLRKKWGADLDKTRETHHHHAVDATLCAVTPFVKVSRYHYAVNEETGEKFMREIDVETGEILDEIPYREYKKAKHYERKTYQVKWSNFREQLKPITIHPKIKFSHRVDKKPNRQLINDTLYSTRMKDEVKTLKSGKEKITTDEYTIGKITDIYTVDGWEAFKKKQDKLLMKEFDEKTYELLVTIAATTPDFQEVEEKNGKVKRVKRSPFAVYCEENGIPAIRKYAKKNNGPVIRSLKYYDGKLNKHINITKDEKGRPVEQTKNGRKVTLQSLKPYRYDIYQDLETKAYYTVQLYYSDLRFVEGEYGITEKEYMKKVAEQTKGQVVRFCFSLQKNDGLEIEWKDSQRYDVRFYNFQSANSINFKGLEQEMIPAENQFKQKPYNNGAINLNIAKYGKEGNKLRKFTTDVLGKKHHLSYEKEPKNIIK

SEQ ID NO: 257 - protein, 1150 aa, Artificial Sequence
  Description of Artificial Sequence: Synthetic polypeptide
  APG01560
MYSIGLDLGISSVGWSVIDEETGKIVDLGARLFSAKNSEKNLERRTSRGARRLIRRKTNRLKDAKKLLEAIGFYEDKALKNVCPYQLRVKGLTEGLTKGELYKVVLHIVKKRGISYLDEDDAEAAKESQDYKEQVRKNAQLLTKYTPGQIQLQRLKENNRVKTGINGQGHYQLNVFKVSAYADELATILKTQQALYPNELTDDWIALFVQPGIAENAGLIYRKRPYYHGPGNEANNSPYGRWSDFQKTGQPAANIFDKLIGKDFQGELRASGLSLSAQQYNLLNDLTNLKIDGEVSLSPDQKEFILTELMTKEFARFGVNDIAKLLGVKKEQLSGWRLDKKGKPEIHTLKGYRNWRKIFAEVGIDLATLPTETIDCLAKVLTLNTEREGVENTLAFELPELAEPVKTLVLDRYKELSQSLSTQAWHRFSLKTLHLLIPELIKSTSEQNTLLEQFQLKAAVRKRYSDYKKLPTKEVLVEIYNPTVNKTVSQAFKVMDALLEKYGKDQIHYITVEMPRDDNEEEERKRIKELQTKNSQRKNDSQQYFLQKSGWSQEKFQATIHKNRRFLAKLLYYFEQDGVCAYTGNPISPELLVSDSTEIDHIIPISISLDDSINNKVLVLSHANQVKGQQTPYDARMAGAFNKINGKFSNWDEYQKWVESKPFSRKKVNNLLETRNIFDSEQVQKFLSRNLNDTRYASRLVLNTLQSFFENQDTIVRVVNGSFTHTLRKKWGADLDKTRETHHHHAVDATLCAVTPFVKVSRYHYAVNEETGEKFMREIDVETGEILDEIPYREYKKAKHYERKTYQVKWSNFREQLKPITIHPKIKFSHQVDRKANRKLSDATIYSVREKTEVKTLKSGKEKITTDEYTIGKIKDIYTVDGWEAFKKKQDKLLMKEFDEKTYELLVTIAATTPDFQEVEEKNGKVKRVKRSPFAVYCEENGIPAIRKYAKKNNGPVIRSLKYYDGKLNKHINITKDEKGRPVEQTKNGRKVTLQSLKPYRYDIYQDLETKAYYTVQLYYSDLRFVEGEYGITEKEYMKKVAEQTKGQVVRFCFSLQKNDGLEIEWKDSQRYDVRFYNFQSANSINFKGLEQEMIPAENQFKQKPYNNGAINLNIAKYGKEGRKLRKFNTDILGKKHHLSYEKEPKNIIK

SEQ ID NO: 258 - protein, 1150 aa, Artificial Sequence
  Description of Artificial Sequence: Synthetic polypeptide
  APG02777
MYSIGLDLGISSVGWSVIDEETGKIVDLGARLFSAKNSEKNLERRTSRGARRLIRRKTNRLKDAKKLLEAIGFYEDKALKNVCPYQLRVKGLTEGLTKGELYKVVLHIVKKRGISYLDEDDAEAAKESQDYKEQVRKNAQLLTKYTPGQIQLQRLKENNRVKTGINGQGHYQLNVFKATAYADEIASLIKSQQAIYPNEISDDWLALFAQPGIAENAGLIYRKRPYYHGPGNEANNSPYGRWSDFQKTGQPAANIFDKLIGKDFQGELRASGLSLSAQQYNLLNDLTNLKIDGEVSLSPDQKEFLISEIMSKEFARFGANDLAKIIGAKKEQLSGWRLDKKGKPEIHTLKGYRNWRKIFAEVGLDIASIPSESLDCIAKVLTLNTEREGAENSIAFEIPEIAEPAKTIAIDRYKEITQTLSTQAWHRFSLKTLHLLIPELIKSTSEQNTLLEQFQLKAAVRKRYSDYKKLPTKEVLVEIYNPTVNKTVSQAFKVMDALLEKYGKDQIHYITVEMPRDDNEEEERKRIKELQTKNSQRKNDSQQYFLQKSGWSQEKFQATIHKNRRFLAKLLYYFEQDGVCAYTGNPISPELLVSDSTEIDHIIPISISLDDSINNKVLVLSHANQVKGQQTPYDARMAGAFNKINGKFSNWDEYQKWVESKPFSRKKVNNLLETRNIFDSEQVQKFLSRNLNDTRYASRLVLNTLQSFFENQDTIVRVVNGSFTHTLRKKWGADLDKTRETHHHHAVDATLCAVTPFVKVSRYHYAVNEETGEKFMREIDVETGEILDEIPYREYKKAKHYERKTYQVKWSNFREQLKPITIHPKIKFSHQVDRKANRKLSDATIYSVREKTEVKTLKSGKEKITTDEYTIGKIKDIYTVDGWEAFKKKQDKLLMKEFDEKTYELLVTIAATTPDFQEVEEKNGKVKRVKRSPFAVYCEENGIPAIRKYAKKNNGPVIRSLKYYDGKLNKHINITKDEKGRPVEQTKNGRKVTLQSLKPYRYDIYQDLETKAYYTVQLYYSDLRFVEGEYGITEKEYMKKVAEQTKGQVVRFCFSLQKNDGLEIEWKDSQRYDVRFYNFQSANSINFKGLEQEMIPAENQFKQKPYNNGAINLNIAKYGKEGRKLRKFNTDILGKKHHLSYEKEPKNIIK

SEQ ID NO: 259 - protein, 1150 aa, Artificial Sequence
  Description of Artificial Sequence: Synthetic polypeptide
  APG05761
MYSIGLDLGISSVGWSVIDEETGKIVDLGVRLFSAKNSEKNLERRTSRGARRLIRRKTNRLKDAKKLLEAIGFYEDKALKNVCPYQLRVKGLTEGLTKGELYKVVLHIVKKRGISYLDEDDAEAAKESQDYKEQVRKNAQLLTKYTPGQIQLQRLKENNRVKTGINGQGHYQLNVFKASAYADELATLLKTQQALYPNEITDDWLALFVQPGIAENAGLIYRKRPYYHGPGNEANNSPYGRWSDFQKTGQPAANIFDKLIGKDFQGELRASGLSLSAQQYNLLNDLTNLKIDGEVSLSPEQKEFLLTELMTKEFARFGVNDIAKLLGAKKEQLSGWRLDKKGKPEIHTLKGYRNWRKIFAEAGIDIASLPTETLDCLAKVLTLNTEREGVENSLAFELPELAEPVKSLVLDHYKELSQSISTQAWHRFSLKTLHLLIPELIKSTSEQNTLLEQFQLKAGVRKRYSDYKKLPTKEVLAEIYNPTVNKTVSQAFKVMDALLEKYGKDQIHYITVEMPRDDNEEEERKRIKELQTKNSQRKNDSQQYFLQKSGWSQEKFQATIHKNRRFLAKLLYYFEQDGVCAYTGNPISPELLVSDSTEIDHIIPISISLDDSINNKVLVLSHANQVKGQQTPYDARMAGAFNKINGKFSNWDEYQKWVESRPFSRKKVNNLLETRNIFDSEQVQKFLSRNLNDTRYASRLVLNTLQSFFENQDTIVRVVNGSFTHTLRKKWGADLDKTRETHHHHAVDATLCAVTPFVKVSRYHYAVNEETGEKFMREIDVETGEILDEIPYREYKKAKHYERKTYQVKWSNFREQLKPITIHPKIKFSHQVDRKANRKLSDATIYSVREKTEVKTLKSGKEKITTDEYTIGKIKDIYTVDGWEAFKKKQDKLLMKEFDEKTYELLVTIAATTPDFQEVEEKNGKVKRVKRSPFAVYCEENGIPAIRKYAKKNNGPVIRSLKYYDGKLNKHINITKDEKGRPVEQTKNGRKVTLQSLKPYRYDIYQDLETKAYYTVQLYYSDLRFVEGEYGITEKEYMKKVAEQTKGQVVRFCFSLQKNDGLEIEWKDSQRYDVRFYNFQSANSINFKGLEQEMIPAENQFKQKPYNNGAINLNIAKYGKEGKKLRKFNTDILGKKHHLSYEKEPKNIIK

SEQ ID NO: 260 - protein, 1150 aa, Artificial Sequence
  Description of Artificial Sequence: Synthetic polypeptide
  APG02479
MYSIGLDLGISSVGWSVIDEETGKIVDLGVRLFSAKNSEKNLERRTSRGARRLIRRKTNRLKDAKKLLEAIGFYEDKALKNVCPYQLRVKGLTEGLTKGELYKVVLHIVKKRGISYLDEDDAEAAKESQDYKEQVRKNAQLLTKYTPGQIQLQRLKENNRVKTGINGQGHYQLNVFKVTAYADELATILKTQQAIYPNEITDDWIAIFVQPGIAENAGLIYRKRPYYHGPGNEANNSPYGRWSDFQKTGQPAANIFDKLIGKDFQGELRASGLSLSAQQYNLLNDLTNLKIDGEVSLSPEQKEFILTELMTKEFARFGANDIAKILGAKKEQLSGWRLDKKGKPEIHTLKGYRNWRKIFAEAGIDIATLPTETIDCLAKVLTLNTEREGAENTLAFELPELAEPAKTLVLDHYKELTQSISTQAWHRFSLKTLHLLIPELIKSTSEQNTLLEQFQLKAGVRKRYSDYKKLPTKEVLAEIYNPTVNKTVSQAFKVMDALLEKYGKDQIHYITVEMPRDDNEEEERKRIKELQTKNSQRKNDSQQYFLQKSGWSQEKFQATIHKNRRFLAKLLYYFEQDGVCAYTGNPISPELLVSDSTEIDHIIPISISLDDSINNKVLVLSHANQVKGQQTPYDARMAGAFNKINGKFSNWDEYQKWVESRPFSRKKVNNLLETRNIFDSEQVQKFLSRNLNDTRYASRLVLNTLQSFFENQDTIVRVVNGSFTHTLRKKWGADLDKTRETHHHHAVDATLCAVTPFVKVSRYHYAVNEETGEKFMREIDVETGEILDEIPYREYKKAKHYERKTYQVKWSNFREQLKPITIHPKIKFSHQVDRKANRKLSDATIYSVREKTEVKTLKSGKEKITTDEYTIGKIKDIYTVDGWEAFKKKQDKLLMKEFDEKTYELLVTIAATTPDFQEVEEKNGKVKRVKRSPFAVYCEENGIPAIRKYAKKNNGPVIRSLKYYDGKLNKHINITKDEKGRPVEQTKNGRKVTLQSLKPYRYDIYQDLETKAYYTVQLYYSDLRFVEGEYGITEKEYMKKVAEQTKGQVVRFCFSLQKNDGLEIEWKDSQRYDVRFYNFQSANSINFKGLEQEMIPAENQFKQKPYNNGAINLNIAKYGKEGKKLRKFNTDILGKKHHLSYEKEPKNIIK

SEQ ID NO: 261 - protein, 1150 aa, Artificial Sequence
  Description of Artificial Sequence: Synthetic polypeptide
  APG08385
MYSIGLDLGISSVGWSVIDEETGKIVDLGVRLFSAKNSEKNLERRTSRGARRLIRRKTNRLKDAKKLLEAIGFYEDKALKNVCPYQLRVKGLTEGLTKGELYKVVLHIVKKRGISYLDEDDAEAAKESQDYKEQVRKNAQLLTKYTPGQIQLQRLKENNRVKTGINGQGHYQLNVFKVSAYADELASILKTQQALYPNEITDDWIAIFVQPGIAENAGLIYRKRPYYHGPGNEANNSPYGRWSDFQKTGQPAANIFDKLIGKDFQGELRASGLSLSAQQYNLLNDLTNLKIDGEVSLSPEQKEFIITELMTKEFARFGVNDLAKILGVKKEQLSGWRLDKKGKPEIHTLKGYRNWRKIFAEAGLDLATIPSETLDCLAKVLTLNTEREGAENTLAFELPELAEPVKTLVLDHYKELSQSISTQAWHRFSLKTLHLLIPELIKSTSEQNTLLEQFQLKAGVRKRYSDYKKLPTKEVLAEIYNPTVNKTVSQAFKVMDALLEKYGKDQIHYITVEMPRDDNEEEERKRIKELQTKNSQRKNDSQQYFLQKSGWSQEKFQATIHKNRRFLAKLLYYFEQDGVCAYTGNPISPELLVSDSTEIDHIIPISISLDDSINNKVLVLSHANQVKGQQTPYDARMAGAFNKINGKFSNWDEYQKWVESRPFSRKKVNNLLETRNIFDSEQVQKFLSRNLNDTRYASRLVLNTLQSFFENQDTIVRVVNGSFTHTLRKKWGADLDKTRETHHHHAVDATLCAVTPFVKVSRYHYAVNEETGEKFMREIDVETGEILDEIPYREYKKAKHYERKTYQVKWSNFREQLKPITIHPKIKFSHQVDRKANRKLSDATIYSVREKTEVKTLKSGKEKITTDEYTIGKIKDIYTVDGWEAFKKKQDKLLMKEFDEKTYELLVTIAATTPDFQEVEEKNGKVKRVKRSPFAVYCEENGIPAIRKYAKKNNGPVIRSLKYYDGKLNKHINITKDEKGRPVEQTKNGRKVTLQSLKPYRYDIYQDLETKAYYTVQLYYSDLRFVEGEYGITEKEYMKKVAEQTKGQVVRFCFSLQKNDGLEIEWKDSQRYDVRFYNFQSANSINFKGLEQEMIPAENQFKQKPYNNGAINLNIAKYGKEGKKLRKFNTDILGKKHHLSYEKEPKNIIK

SEQ ID NO: 262 - protein, 1150 aa, Artificial Sequence
  Description of Artificial Sequence: Synthetic polypeptide
  APG09217
MYSIGLDLGISSVGWSVIDEETGKIVDLGVRLFSAKNSEKNLERRTSRGARRLIRRKTNRLKDAKKLLEAIGFYEDKALKNVCPYQLRVKGLTEGLTKGELYKVVLHIVKKRGISYLDEDDAEAAKESQDYKEQVRKNAQLLTKYTPGQIQLQRLKENNRVKTGINGQGHYQLNVFKVTAYADEIASILKTQQAIYPNEITDDWIALFVQPGIAENAGLIYRKRPYYHGPGNEANNSPYGRWSDFQKTGQPAANIFDKLIGKDFQGELRASGLSLSAQQYNLLNDLTNLKIDGEVSLSPEQKEFIISELMTKEFARFGVNDLAKIIGVKKEQLSGWRLDKKGKPEIHTLKGYRNWRKIFAEAGIDLATLPSETLDCLAKVLTLNTEREGAENTLAFELPELAEPVKSLVLDHYKELSQTISTQAWHRFSLKTLHLLIPELIKSTSEQNTLLEQFQLKAGVRKRYSDYKKLPTKEVLAEIYNPTVNKTVSQAFKVMDALLEKYGKDQIHYITVEMPRDDNEEEERKRIKELQTKNSQRKNDSQQYFLQKSGWSQEKFQATIHKNRRFLAKLLYYFEQDGVCAYTGNPISPELLVSDSTEIDHIIPISISLDDSINNKVLVLSHANQVKGQQTPYDARMAGAFNKINGKFSNWDEYQKWVESRPFSRKKVNNLLETRNIFDSEQVQKFLSRNLNDTRYASRLVLNTLQSFFENQDTIVRVVNGSFTHTLRKKWGADLDKTRETHHHHAVDATLCAVTPFVKVSRYHYAVNEETGEKFMREIDVETGEILDEIPYREYKKAKHYERKTYQVKWSNFREQLKPITIHPKIKFSHQVDRKANRKLSDATIYSVREKTEVKTLKSGKEKITTDEYTIGKIKDIYTVDGWEAFKKKQDKLLMKEFDEKTYELLVTIAATTPDFQEVEEKNGKVKRVKRSPFAVYCEENGIPAIRKYAKKNNGPVIRSLKYYDGKLNKHINITKDEKGRPVEQTKNGRKVTLQSLKPYRYDIYQDLETKAYYTVQLYYSDLRFVEGEYGITEKEYMKKVAEQTKGQVVRFCFSLQKNDGLEIEWKDSQRYDVRFYNFQSANSINFKGLEQEMIPAENQFKQKPYNNGAINLNIAKYGKEGKKLRKFNTDILGKKHHLSYEKEPKNIIK

SEQ ID NO: 263 - protein, 1150 aa, Artificial Sequence
  Description of Artificial Sequence: Synthetic polypeptide
  APG06657
MYSIGLDLGISSVGWSVIDEETGKIVDLGVRLFSAKNSEKNLERRTSRGARRLIRRKTNRLKDAKKLLEAIGFYEDKALKNVCPYQLRVKGLTEGLTKGELYKVVLHIVKKRGISYLDEDDAEAAKESQDYKEQVRKNAQLLTKYTPGQIQLQRLKENNRVKTGINGQGHYQLNVFKASAYADEIASLLKTQQAIYPNELTDDWLALFVQPGIAENAGLIYRKRPYYHGPGNEANNSPYGRWSDFQKTGQPAANIFDKLIGKDFQGELRASGLSLSAQQYNLLNDLTNLKIDGEVSLSPEQKEFIISELMTKEFARFGANDIAKLLGVKKEQLSGWRLDKKGKPEIHTLKGYRNWRKIFAEAGLDLATLPTETIDCLAKVLTLNTEREGAENSLAFELPELAEPVKSLALDHYKELTQSISTQAWHRFSLKTLHLLIPELIKSTSEQNTLLEQFQLKAGVRKRYSDYKKLPTKEVLAEIYNPTVNKTVSQAFKVMDALLEKYGKDQIHYITVEMPRDDNEEEERKRIKELQTKNSQRKNDSQQYFLQKSGWSQEKFQATIHKNRRFLAKLLYYFEQDGVCAYTGNPISPELLVSDSTEIDHIIPISISLDDSINNKVLVLSHANQVKGQQTPYDARMAGAFNKINGKFSNWDEYQKWVESRPFSRKKVNNLLETRNIFDSEQVQKFLSRNLNDTRYASRLVLNTLQSFFENQDTIVRVVNGSFTHTLRKKWGADLDKTRETHHHHAVDATLCAVTPFVKVSRYHYAVNEETGEKFMREIDVETGEILDEIPYREYKKAKHYERKTYQVKWSNFREQLKPITIHPKIKFSHQVDRKANRKLSDATIYSVREKTEVKTLKSGKEKITTDEYTIGKIKDIYTVDGWEAFKKKQDKLLMKEFDEKTYELLVTIAATTPDFQEVEEKNGKVKRVKRSPFAVYCEENGIPAIRKYAKKNNGPVIRSLKYYDGKLNKHINITKDEKGRPVEQTKNGRKVTLQSLKPYRYDIYQDLETKAYYTVQLYYSDLRFVEGEYGITEKEYMKKVAEQTKGQVVRFCFSLQKNDGLEIEWKDSQRYDVRFYNFQSANSINFKGLEQEMIPAENQFKQKPYNNGAINLNIAKYGKEGKKLRKFNTDILGKKHHLSYEKEPKNIIK

SEQ ID NO: 264 - protein, 1150 aa, Enterococcus sp.; identical to SEQ ID NO: 215
  APG05586

SEQ ID NO: 265 - protein, 1063 aa, Artificial Sequence
  Description of Artificial Sequence: Synthetic polypeptide
  APG07433.1 deletion variant
MRELDYRIGLDIGTNSIGWGVIELSWNKDRERYEKVRIVDQGVRMFDRAEMPKTGASLAEPRRIARSSRRRLNRKSQRKKNIRNLLVQHGVITQEELDSLYPLSKKSMDIWGIRLDGLDRLLNHFEWARLLIHLAQRRGFKSNRKSELKDTETGKVLSSIQLNEKRLSLYRTVGEMWMKDPDFSKYDRKRNSPNEYVFSVSRAELEKEIVTLFAAQRRFQSPYASKDLQETYLQIWTHQLPFASGNAILNKVGYCSLLKGKERRIPKATYTFQYFSALDQVNRTRLGPDFQPFTKEQREIILNNMFQRTDYYKKKTIPEVTYYDIRKWLELDETIQFKGLNYDPNEELKKIEKKPFINLKAFYEINKVVANYSERTNETFSTLDYDGIGYALTVYKTDKDIRSYLKSSHNLPKRCYDDQLIEELLSLSYTKFGHLSLKAINHVLSIMQKGNTYKEAVDQLGYDTSGLKKEKRSKFLPPISDEITNPIVKRALTQARKVVNAIIRRHGSPHSVHIELARELSKNHDERTKIVSAQDENYKKNKGAISILSEHGILNPTGYDIVRYKLWKEQGERCAYSLKEIPADTFFNEPILEVDHILPYSQSFIDSYHNKVLVYSDENRKKGNRIPYTYFLETNKDWEAFERYVRSNKFFSKKKREYLLKRAYLPRESELIKERHLNDTRYASTFLKNFIEQNLQFKEAEDNPRKRRVQTVNGVITAHFRKRWGLEKDRQETYLHHAMDAIIVACTDHHMVTRVTEYYQIKESNKSVKKPYFPMPWEGFRDELLSHLASQPIAKKISEELKAGYQSLDYIFVSRMPKRSITGAAHKQTIMRKGGIDKKGKTIIIERLHLKDIKFDENGDFKMVGKEQDMATYEAIKQRYLEHGKNSKKAFETPLYKPSKKGTGNLIKRVKVEGQAKSFVREVNGGVAQNGDLVRVDLFEKDDKYYMVPIYVPDTVCSELPKKVVASSKGYEQWLTLDNSFTFKFSLYPYDLVRLVKGDEDRFLYFGTLDIDSDRLNFKDVNKPSKKNEYRYSLKTIEDLEKYEVGVLGDLRLVRKETRRNFH

SEQ ID NO: 266 - RNA, 21 nt, Bacillus sp.
  APG07433.1 crRNA repeat sequence
gucauaguuccauuaaagcca

SEQ ID NO: 267 - RNA, 85 nt, Bacillus sp.; identical to SEQ ID NO: 67
  APG07433.1 tracrRNA

SEQ ID NO: 268 - DNA, 6 bp, Artificial Sequence
  Description of Artificial Sequence: Synthetic oligonucleotide
  APG05083.1, APG07433.1, and APG07513.1 PAM
  modified_base (1)..(4): a, c, t, g, unknown or other
nnnncc

SEQ ID NO: 269 - protein, 1064 aa, Artificial Sequence
  Description of Artificial Sequence: Synthetic polypeptide
  APG08290.1 deletion variant
MSELDYRIGLDIGTNSIGWGVIELFWNKDRERYEKVRIVDKGVRMFDKAEIPNKGASLAEPRRIARSSRRRLNRKSQRKKEIRNLLVQHGMITQEELDLLYPLSKKSIDIWDIRLDGLDRLLNHLEWARLLIHLAQRRGFKSNRKSELKDAETGKVLSSIQVNEKRLFLYRTVGEMWIKDAEFSKYDRRRNSPNEYVFSVSRADLEKEIVTLFEAQRKFQSSYASKNLQETYLQIWAHQLPFASGNAILNKVGYCSLLKGKERRIPKATYTFQYFSALDQVNRTRLGPDFQPFTQEQKEIILDKMFQRTDYYKKKTIPEVSYYDIRKWLELDETIQFKGLNYDPNEELKKIEKKPFINLKAFYEIKKVVANYAERTNEAFSTLDYDAIAYALTVYKTDKDIRSYLKKSNNLSKRCYDDQLIEELFTLSYTKFGHLSFKAINHVLPIMQEGRTYQEAIHQLGYDTTNLKKENRSMFLPLIPDEITNPIVKRAITQARKVVNAIIRRYGSPNSVHIELARELSKSHDERKKIMTAHDENYKKNKGAISILIENGILNPTGYDIVRYKLWKEQGERCAYSLKEIPPDTFFNEPILEVDHILPYSQSFIDSYHNKVLVYSDENRNKGNRIPYTYFLETNKDWEAFERYVRSNKLFSKKKREYLLKKTYLPRESELIKERHLNDTRYASTFLKNFIEQNLQFKEVEVNLRKKRVQTVNGVITAHLRKRWGLEKNRQETYLHHAMDAIIVACTDHHMVTRITEYYQIKESNKSVKKPYFPMPWEGFRDELLSHLASQPIAKKISEELKAGYQSSDYIFVSRMPKRSVTGAAHDQTIRRKGGIDKKGKTIIIKRVRLKDIKFDENGDFKMVGKEQDLATYEAIKQRYLEHRKNSKKAFETPLYKPSKKGTGNLIKRVKIEGQTKAFVREVNGGVAQNSDLVRVDLFEKDDKYYMVPIYVPDTVCSELPKKVVKSGKGYEQWLTLDNSFTFKSSLYPYDLVRLVKGNEDRFLYFGTLDIDSDRLNFKDVNKPSKQNEYRYSLKTIENLEKYEVGVLGDLRLVKQETRRIFNR

SEQ ID NO: 270 - RNA, 21 nt, Bacillus sp.
  APG08290.1 crRNA repeat sequence
gucauaguuccaugaaagcca

SEQ ID NO: 271 - RNA, 85 nt, Bacillus sp.; identical to SEQ ID NO: 72
  APG08290.1 tracrRNA

SEQ ID NO: 272 - DNA, 6 bp, Artificial Sequence
  Description of Artificial Sequence: Synthetic oligonucleotide
  APG08290.1 PAM
  modified_base (1)..(2): a, c, t, g, unknown or other
  modified_base (4)..(4): a, c, t, g, unknown or other
nnrncc

That which is claimed:

1. A promoter comprising a nucleotide sequence having at least 90% sequence identity to the nucleotide sequence set forth as any one of SEQ ID NOs: 6-10.

2. The promoter of claim 1, wherein said promoter comprises a nucleotide sequence having 100% sequence identity to the nucleotide sequence set forth as any one of SEQ ID NOs: 6-10.

3. The promoter of claim 1 or 2, wherein said promoter comprises a TATA box sequence.

4. The promoter of any one of claims 1-3, wherein said promoter comprises an octamer (OCT) sequence.

5. The promoter of any one of claims 1-4, wherein said promoter comprises a SPH sequence.

6. The promoter of any one of claims 1-5, wherein said promoter comprises a proximal sequence element (PSE).

7. A vector comprising the promoter of any one of claims 1-6.

8. The vector of claim 7, wherein said vector is a viral vector.

9. The vector of claim 8, wherein said viral vector is an adeno-associated viral (AAV) vector.

10. An expression construct comprising the promoter of any one of claims 1-6 and a coding sequence, wherein said coding sequence is operably linked to said promoter.

11. The expression construct of claim 10, wherein said coding sequence is heterologous to said promoter.

12. The expression construct of claim 10 or 11, wherein said coding sequence encodes an RNA.

13. The expression construct of claim 12, wherein said RNA comprises a guide RNA.

14. The expression construct of claim 10 or 11, wherein said coding sequence encodes a polypeptide.

15. A polynucleotide comprising the expression construct of claim 13 and an RNA-guided nuclease (RGN)-encoding nucleotide sequence, wherein said RGN is capable of binding said guide RNA.

16. The polynucleotide of claim 15, wherein said polynucleotide further comprises an RNA polymerase II (pol II) promoter operably linked to the RGN-encoding nucleotide sequence.

17. The polynucleotide of claim 15 or 16, wherein said RGN is fused to a base-editing polypeptide.

18. The polynucleotide of claim 17, wherein said base-editing polypeptide comprises a cytosine deaminase or adenine deaminase.

19. The polynucleotide of claim 15 or 16, wherein said RGN is fused to a transcriptional activator or transcriptional repressor.

20. The polynucleotide of claim 15 or 16, wherein said RGN is fused to a detectable label.

21. The expression construct of claim 12, wherein said RNA is a crRNA.

22. A polynucleotide comprising the expression construct of claim 21 and a tracrRNA-encoding nucleotide sequence.

23. The polynucleotide of claim 22, wherein said polynucleotide further comprises an RNA polymerase III (pol III) promoter operably linked to said tracrRNA-encoding nucleotide sequence.

24. The polynucleotide of claim 23, wherein said pol III promoter comprises a nucleotide sequence having at least 90% sequence identity to the nucleotide sequence set forth as any one of SEQ ID NOs: 1-10.

25. The polynucleotide of claim 23, wherein said pol III promoter comprises a nucleotide sequence having 100% sequence identity to the nucleotide sequence set forth as any one of SEQ ID NOs: 1-10.

26. The polynucleotide of any one of claims 22-25, wherein said polynucleotide further comprises an RNA-guided nuclease (RGN)-encoding nucleotide sequence, wherein said RGN is capable of binding said crRNA and said tracrRNA.

27. The polynucleotide of claim 26, wherein said polynucleotide further comprises an RNA polymerase II (pol II) promoter operably linked to said RGN-encoding nucleotide sequence.

28. The polynucleotide of claim 26 or 27, wherein said RGN is fused to abase-editing polypeptide.

29. The polynucleotide of claim 28, wherein said base-editing polypeptide comprises a cytosine deaminase or adenine deaminase.

30. The polynucleotide of claim 26 or 27, wherein said RGN is fused to a transcriptional activator or transcriptional repressor.

31. The polynucleotide of claim 26 or 27, wherein said RGN is fused to a detectable label.

32. The expression construct of claim 12, wherein said RNA is a tracrRNA.

33. A polynucleotide comprising the expression construct of claim 32 and a crRNA-encoding nucleotide sequence.

34. The polynucleotide of claim 33, wherein said polynucleotide further comprises an RNA polymerase III (pol III) promoter operably linked to said crRNA-encoding nucleotide sequence.

35. The polynucleotide of claim 34, wherein said pol III promoter comprises a nucleotide sequence having at least 90% sequence identity to the nucleotide sequence set forth as any one of SEQ ID NOs: 1-10.

36. The polynucleotide of claim 34, wherein said pol III promoter comprises a nucleotide sequence having 100% sequence identity to the nucleotide sequence set forth as any one of SEQ ID NOs: 1-10.

37. The polynucleotide of any one of claims 33-36, wherein said polynucleotide further comprises an RNA-guided nuclease (RGN)-encoding nucleotide sequence, wherein said RGN is capable of binding to said crRNA and said tracrRNA.

38. The polynucleotide of claim 37, wherein said polynucleotide further comprises an RNA polymerase II (pol II) promoter operably linked to said RGN-encoding nucleotide sequence.

39. The polynucleotide of claim 37 or 38, wherein said RGN is fused to abase-editing polypeptide.

40. The polynucleotide of claim 39, wherein said base-editing polypeptide comprises a cytosine deaminase or adenine deaminase.

41. The polynucleotide of claim 37 or 38, wherein said RGN is fused to a transcriptional activator or transcriptional repressor.

42. The polynucleotide of claim 37 or 38, wherein said RGN is fused to a detectable label.

43. The expression construct of claim 12, wherein said RNA comprises a gene silencing RNA.

44. A vector comprising the expression construct of any one of claims 10-13, 21, 32, and 43 or the polynucleotide of any one of claims 15-20, 22-31, and 33-42.

45. The vector of claim 44, wherein said vector is a viral vector.

46. The vector of claim 45, wherein said viral vector is an adeno-associated viral (AAV) vector.

47. An expression construct comprising:
a) a promoter comprising a nucleotide sequence having at least 90% sequence identity to the nucleotide sequence set forth as any one of SEQ ID NOs: 1-5; and
b) a heterologous coding sequence operably linked to said promoter.

48. The expression construct of claim 47, wherein said promoter comprises a nucleotide sequence having 100% sequence identity to the nucleotide sequence set forth as any one of SEQ ID NOs: 1-5.

49. The expression construct of claim 47 or 48, wherein said promoter comprises a TATA box sequence.

50. The expression construct of any one of claims 47-49, wherein said promoter comprises an octamer (OCT) sequence.

51. The expression construct of any one of claims 47-50, wherein said promoter comprises a SPH sequence.

52. The expression construct of any one of claims 47-51, wherein said promoter comprises a proximal sequence element (PSE).

53. The expression construct of any one of claims 47-52, wherein said heterologous coding sequence encodes an RNA.

54. The expression construct of claim 53, wherein said RNA comprises a guide RNA.

55. The expression construct of any one of claims 47-52, wherein said heterologous coding sequence encodes a polypeptide.

56. A polynucleotide comprising the expression construct of claim 54 and an RNA-guided nuclease (RGN)-encoding nucleotide sequence, wherein said RGN is capable of binding said guide RNA.

57. The polynucleotide of claim 56, wherein said polynucleotide further comprises an RNA polymerase II (pol II) promoter operably linked to the RGN-encoding nucleotide sequence.

58. The polynucleotide of claim 56 or 57, wherein said RGN is fused to abase-editing polypeptide.

59. The polynucleotide of claim 58, wherein said base-editing polypeptide comprises a cytosine deaminase or adenine deaminase.

60. The polynucleotide of claim 56 or 57, wherein said RGN is fused to a transcriptional activator or transcriptional repressor.

61. The polynucleotide of claim 56 or 57, wherein said RGN is fused to a detectable label.

62. The expression construct of claim 53, wherein said RNA is a crRNA.

63. A polynucleotide comprising the expression construct of claim 62 and a tracrRNA-encoding nucleotide sequence.

64. The polynucleotide of claim 63, wherein said polynucleotide further comprises an RNA polymerase III (pol III) promoter operably linked to said tracrRNA-encoding nucleotide sequence.

65. The polynucleotide of claim 64, wherein said pol III promoter comprises a nucleotide sequence having at least 90% sequence identity to the nucleotide sequence set forth as any one of SEQ ID NOs: 1-10.

66. The polynucleotide of claim 64, wherein said pol III promoter comprises a nucleotide sequence having 100% sequence identity to the nucleotide sequence set forth as any one of SEQ ID NOs: 1-10.

67. The polynucleotide of any one of claims 63-66, wherein said polynucleotide further comprises an RNA-guided nuclease (RGN)-encoding nucleotide sequence, wherein said RGN is capable of binding to said crRNA and said tracrRNA.

68. The polynucleotide of claim 67, wherein said polynucleotide further comprises an RNA polymerase II (pol II) promoter operably linked to said RGN-encoding nucleotide sequence.

69. The polynucleotide of claim 67 or 68, wherein said RGN is fused to abase-editing polypeptide.

70. The polynucleotide of claim 69, wherein said base-editing polypeptide comprises a cytosine deaminase or adenine deaminase.

71. The polynucleotide of claim 67 or 68, wherein said RGN is fused to a transcriptional activator or transcriptional repressor.

72. The polynucleotide of claim 67 or 68, wherein said RGN is fused to a detectable label.

73. The expression construct of claim 53, wherein said RNA is a tracrRNA.

74. A polynucleotide comprising the expression construct of claim 73 and a crRNA-encoding nucleotide sequence.

75. The polynucleotide of claim 74, wherein said polynucleotide further comprises an RNA polymerase III (pol III) promoter operably linked to said crRNA-encoding nucleotide sequence.

76. The polynucleotide of claim 75, wherein said pol III promoter comprises a nucleotide sequence having at least 90% sequence identity to the nucleotide sequence set forth as any one of SEQ ID NOs: 1-10.

77. The polynucleotide of claim 75, wherein said pol III promoter comprises a nucleotide sequence having 100% sequence identity to the nucleotide sequence set forth as any one of SEQ ID NOs: 1-10.

78. The polynucleotide of any one of claims 74-77, wherein said polynucleotide further comprises an RNA-guided nuclease (RGN)-encoding nucleotide sequence, wherein said RGN is capable of binding to said crRNA and said tracrRNA.

79. The polynucleotide of claim 78, wherein said polynucleotide further comprises an RNA polymerase II (pol II) promoter operably linked to said RGN-encoding nucleotide sequence.

80. The polynucleotide of claim 78 or 79, wherein said RGN is fused to abase-editing polypeptide.

81. The polynucleotide of claim 80, wherein said base-editing polypeptide comprises a cytosine deaminase or adenine deaminase.

82. The polynucleotide of claim 78 or 79, wherein said RGN is fused to a transcriptional activator or transcriptional repressor.

83. The polynucleotide of claim 78 or 79, wherein said RGN is fused to a detectable label.

84. The expression construct of claim 57, wherein said RNA comprises a gene silencing RNA.

85. A vector comprising the expression construct of any one of claims 47-55, 62, 73, and 84 or the polynucleotide of any one of claims 56-61, 63-72, and 74-83.

86. The vector of claim 85, wherein said vector is a viral vector.

87. The vector of claim 86, wherein said viral vector is an adeno-associated viral (AAV) vector.

88. A cell comprising the promoter of any one of claims 1-6, the expression construct of any one of claims 10-14, 21, 32, 43, 47-55, 62, 73, and 84, the polynucleotide of any one of claims 15-20, 22-31, 33-42, 56-61, 63-72, and 74-83, or the vector of any one of claims 7-9, 44-46, and 85-87.

89. The cell of claim 88, wherein said cell is a prokaryotic cell.

90. The cell of claim 88, wherein said cell is a eukaryotic cell.

91. The cell of claim 90, wherein said eukaryotic cell is a plant cell.

92. A plant comprising the promoter of any one of claims 1-6, the expression construct of any one of claims 10-14, 21, 32, 43, 47-55, 62, 73, and 84, the polynucleotide of any one of claims 15-20, 22-31, 33-42, 56-61, 63-72, and 74-83, the vector of any one of claims 7-9, 44-46, and 85-87, or the cell of claim 91.

93. A seed comprising the cell of claim 91.

94. A pharmaceutical composition comprising a pharmaceutically acceptable carrier and the expression construct of any one of claims 10-14, 21, 32, 43, 47-55, 62, 73, and 84, the polynucleotide of any one of claims 15-20, 22-31, 33-42, 56-61, 63-72, and 74-83, the vector of any one of claims 44-46 and 85-87, or the cell of claim 90.

95. The pharmaceutical composition of claim 107, wherein the pharmaceutical composition is lipid-based.

96. The pharmaceutical composition of claim 108, wherein the lipid-based pharmaceutical composition comprises liposomes or lipid nanoparticles (LNPs).

97. The pharmaceutical composition of claim 109, wherein the expression construct, the polynucleotide, the vector, or the cell is encapsulated in, and/or non-covalently or covalently attached to the liposomes or the LNPs.

98. A method for preparing an expression construct wherein said method comprises inserting a coding sequence into a nucleic acid molecule comprising the promoter of any one of claims 1-6 such that the coding sequence is operably linked to said promoter.

99. A method for preparing an expression construct wherein said method comprises inserting a promoter comprising a nucleotide sequence having at least 90% sequence identity to the nucleotide sequence set forth as any one of SEQ ID NOs: 6-10 into a nucleic acid molecule comprising a coding sequence such that the coding sequence is operably linked to said promoter.

100. The method of claim 99, wherein said promoter comprises a nucleotide sequence having 100% sequence identity to the nucleotide sequence set forth as any one of SEQ ID NOs: 6-10.

101. The method of any one of claims 98-100, wherein said coding sequence is heterologous to said promoter.

102. The method of any one of claims 98-101, wherein said coding sequence encodes an RNA.

103. The method of claim 102, wherein said RNA comprises a guide RNA.

104. The method of claim 102, wherein said RNA is a crRNA.

105. The method of claim 102, wherein said RNA is a tracrRNA.

106. The method of claim 102, wherein said RNA comprises a gene silencing RNA.

107. The method of any one of claims 98-101, wherein said coding sequence encodes a polypeptide.

108. A method for expressing an RNA, said method comprising contacting in vitro the expression construct of any one of claims 12, 13, 21, 32, 43, 53, 54, 62, 73, and 84, or the polynucleotide of any one of claims 15-20, 22-31, 33-42, 56-61, 63-72, and 74-83 with RNA polymerase III and ribonucleotide triphosphates.

109. A method for expressing an RNA in a cell, said method comprising introducing into said cell the expression construct of any one of claims 12, 13, 21, 32, 43, 53, 54, 62, 73, and 84, or the polynucleotide of any one of claims 15-20, 22-31, 33-42, 56-61, 63-72, and 74-83.

110. A method for expressing a polypeptide in a cell, said method comprising introducing into said cell the expression construct of claim 14.

111. A method for making an RGN ribonucleoprotein complex in a cell, said method comprising introducing into a cell the polynucleotide of any one of claims 15-20, 26-31, 37-42, 56-61, 67-72, and 78-83, wherein the RGN and the gRNA form an RGN ribonucleoprotein complex.

112. The method of claim 111, further comprising purifying said RGN ribonucleoprotein complex.

113. A method for making an mRNA in vitro, said method comprising contacting the expression construct of claim 14 or 55 with RNA polymerase II and ribonucleotide triphosphates.

114. The method of claim 113, wherein said method further comprises contacting the expression construct with a cap analog to generate a capped mRNA.

115. The method of claim 113 or 114, wherein said method further comprises contacting the capped mRNA with a poly(A) polymerase to generate a capped and tailed mRNA.

116. The method of claim 114 or 115, wherein said method further comprises contacting said capped mRNA or said capped and tailed mRNA in vitro with a cell-free lysate to generate an in vitro translated polypeptide.

117. A method for binding a target nucleic acid molecule in a cell, wherein the target nucleic acid molecule comprises a target sequence, said method comprising introducing into said cell the polynucleotide of any one of claims 15-20, 26-31, 37-42, 56-61, 67-72, and 78-83, wherein said guide RNA of any one of claims 15-20, and 56-61 or the crRNA and tracrRNA of the polynucleotide of any one of claims 26-31, 37-42, 67-72, and 78-83 binds to said RGN, thereby directing said RGN to bind to said target sequence within said target nucleic acid molecule.

118. A method for cleaving and/or modifying a target nucleic acid molecule in a cell, wherein said target nucleic acid molecule comprises a target sequence, said method comprising introducing into said cell the polynucleotide of any one of claims 15-18, 26-29, 37-40, 56-59, 67-70, and 78-81, wherein said guide RNA of any one of claims 15-18, and 56-59 or the crRNA and tracrRNA of the polynucleotide of any one of claims 26-29, 37-40, 67-70, and 78-81 binds to said RGN, thereby directing said RGN to bind to said target sequence and cleave and/or modify said target nucleic acid molecule.

119. A method for modifying the expression of a target gene in a cell, wherein said target gene comprises a target sequence, said method comprising introducing into said cell the polynucleotide of any one of claims 19, 30, 41, 60, 71, and 82, wherein said guide RNA of claim 19 or 60 or the crRNA and tracrRNA of the polynucleotide of any one of claims 30, 41, 71, and 82 binds to said RGN, thereby directing said RGN to said target sequence and modifying the expression of said target gene.

120. A method for detecting a target sequence in a cell, said method comprising introducing into said cell the polynucleotide of any one of claims 20, 31, 42, 61, 72, and 83, wherein said guide RNA of claim 20 or 61 or the crRNA and tracrRNA of the polynucleotide of any one of claims 31, 42, 72, and 83 binds to said RGN, thereby directing said RGN to said target sequence; and detecting said detectable label.

121. A method for binding a target nucleic acid molecule in a cell, wherein said target nucleic acid molecule comprises a target sequence, wherein said method comprises introducing into said cell the expression construct of claim 13 or 54, or the polynucleotide of any one of claims 22-25, 33-36, 63-66, and 75-77, wherein said cell comprises an RNA-guided nuclease (RGN); and wherein said guide RNA of claim 13 or 54, or the crRNA and tracrRNA of the polynucleotide of any one of claims 22-25, 33-36, 63-66, and 75-77 binds to said RGN, thereby directing said RGN to bind said target sequence within said target nucleic acid molecule.

122. A method for cleaving and/or modifying a target nucleic acid molecule in a cell, wherein said target nucleic acid molecule comprises a target sequence, wherein said method comprises introducing into said cell the expression construct of claim 13 or 54, or the polynucleotide of any one of claims 22-25, 33-36, 63-66, and 75-77, wherein said cell comprises:
a) an RNA-guided nuclease (RGN); or
b) a fusion protein comprising a nuclease-inactive or nickase RGN fused to a base-editing polypeptide;
and wherein said guide RNA of claim 13 or 54, or the crRNA and tracrRNA of the polynucleotide of any one of claims 22-25, 33-36, 63-66, and 75-77 binds to said RGN, thereby directing said RGN or said fusion protein to bind to said target sequence within said target nucleic acid molecule and cleave and/or modify said target nucleic acid molecule.

123. The method of claim 122, further comprising introducing said RGN or said fusion protein or a nucleic acid molecule encoding the same into said cell prior to or simultaneously with the introduction of said expression construct of claim 13 or 54, or the polynucleotide of any one of claims 22-25, 33-36, 63-66, and 75-77.

124. A method for modifying the expression of a target gene, wherein said target gene comprise a target sequence, wherein said method comprises introducing into said cell the expression construct of claim 13 or 54, or the polynucleotide of any one of claims 22-25, 33-36, 63-66, and 75-77, wherein said cell comprises a fusion protein comprising an RNA-guided nuclease (RGN) fused to a transcriptional activator or transcriptional repressor, and wherein said guide RNA of claim 13 or 54, or the crRNA and tracrRNA of the polynucleotide of any one of claims 22-25, 33-36, 63-66, and 75-77 binds to said RGN, thereby directing said fusion protein to said target sequence and modifying the expression of said target gene.

125. The method of claim 124, further comprising introducing said fusion protein or a nucleic acid molecule encoding the same into said cell prior to or simultaneously with the introduction of said expression construct of claim 13 or 54, or the polynucleotide of any one of claims 22-25, 33-36, 63-66, and 75-77.

126. A method for detecting a target sequence in a cell, wherein said method comprises introducing into said cell the expression construct of claim 13 or 54, or the polynucleotide of any one of claims 22-25, 33-36, 63-66, and 75-77, wherein said cell comprises a fusion protein comprising an RNA-guided nuclease (RGN) fused to a detectable label, and wherein said guide RNA of claim 13 or 54, or the crRNA and tracrRNA of the polynucleotide of any one of claims 22-25, 33-36, 63-66, and 75-77 binds to said RGN, thereby directing said fusion protein to said target sequence; and detecting said detectable label.

127. The method of claim 126, further comprising introducing said fusion protein or a nucleic acid molecule encoding the same into said cell prior to or simultaneously with the introduction of said expression construct of claim 13 or 54, or the polynucleotide of any one of claims 22-25, 33-36, 63-66, and 75-77.

128. A method for binding a target nucleic acid molecule in a cell, wherein said target nucleic acid molecule comprises a target sequence, wherein said method comprises:
a) introducing into said cell the expression construct of claim 13 or 54, or the polynucleotide of any one of claims 22-25, 33-36, 63-66, and 75-77; and
b) introducing into said cell:
i) an RNA-guided nuclease (RGN); or
ii) a nucleic acid molecule encoding an RGN;
wherein said step a) occurs before, during, or after step b); and
wherein said guide RNA of claim 13 or 54, or the crRNA and tracrRNA of the polynucleotide of any one of claims 22-25, 33-36, 63-66, and 75-77 binds to said RGN, thereby directing said RGN to bind said target sequence within said target nucleic acid molecule.

129. A method for cleaving and/or modifying a target nucleic acid molecule in a cell, wherein said target nucleic acid molecule comprises a target sequence, wherein said method comprises:
a) introducing into said cell the expression construct of claim 13 or 54, or the polynucleotide of any one of claims 22-25, 33-36, 63-66, and 75-77; and
b) introducing into said cell:
i) an RNA-guided nuclease (RGN);
ii) a fusion protein comprising a nuclease-inactive or nickase RGN fused to a base-editing polypeptide;
iii) a nucleic acid molecule encoding an RGN; or
iv) a nucleic acid molecule encoding a fusion protein comprising a nuclease-inactive or nickase RGN fused to a base-editing polypeptide;
wherein said step a) occurs before, during, or after step b); and
wherein said guide RNA of claim 13 or 54, or the crRNA and tracrRNA of the polynucleotide of any one of claims 22-25, 33-36, 63-66, and 75-77 binds to said RGN, thereby directing said RGN or said fusion protein to bind to said target sequence and cleave and/or modify said target nucleic acid molecule.

130. The method of claim 129, wherein said step b) iii) comprises introducing a polynucleotide comprising said nucleic acid molecule encoding said RGN or step b) iv) comprises introducing a polynucleotide comprising said nucleic acid molecule encoding said fusion protein, and wherein said polynucleotide further comprises an RNA polymerase II (pol II) promoter operably linked to said nucleic acid molecule encoding said RGN or said nucleic acid molecule encoding said fusion protein.

131. A method for modifying the expression of a target gene in a cell, wherein said target gene comprises a target sequence, wherein said method comprises:
a) introducing into said cell the expression construct of claim 13 or 54, or the polynucleotide of any one of claims 22-25, 33-36, 63-66, and 75-77; and
b) introducing into said cell:
i) a fusion protein comprising a nuclease-inactive RNA-guided nuclease (RGN) fused to a transcriptional activator or transcriptional repressor; or
ii) a nucleic acid molecule encoding a fusion protein comprising a nuclease-inactive RGN fused to a transcriptional activator or transcriptional repressor;
wherein said step a) occurs before, during, or after step b); and
wherein said guide RNA of claim 13 or 54, or the crRNA and tracrRNA of the polynucleotide of any one of claims 22-25, 33-36, 63-66, and 75-77 binds to said RGN, thereby directing said fusion protein to said target sequence and modifying the expression of said target gene.

132. The method of claim 131, wherein said step b) ii) comprises introducing a polynucleotide comprising said nucleic acid molecule encoding said fusion protein, and wherein said polynucleotide further comprises an RNA polymerase II (pol II) promoter operably linked to said nucleic acid molecule encoding said fusion protein.

133. A method for detecting a target sequence in a cell, wherein said method comprises:
a) introducing into said cell the expression construct of claim 13 or 54, or the polynucleotide of any one of claims 22-25, 33-36, 63-66, and 75-77; and
b) introducing into said cell:
i) a fusion protein comprising nuclease-inactive RNA-guided nuclease (RGN) fused to a detectable label; or
ii) a nucleic acid molecule encoding a fusion protein comprising a nuclease-inactive RGN fused to a detection label; and
c) detecting said detectable label;
wherein said step a) occurs before, during, or after step b); and
wherein said guide RNA of claim 13 or 54, or the crRNA and tracrRNA of the polynucleotide of any one of claims 22-25, 33-36, 63-66, and 75-77 binds to said RGN and directs said fusion protein to said target sequence.

134. The method of claim 133, wherein said step b) ii) comprises introducing into said cell a polynucleotide comprising said nucleic acid molecule encoding said fusion protein, and wherein said polynucleotide further comprises an RNA polymerase II (pol II) promoter operably linked to said nucleic acid molecule encoding said fusion protein.

135. A method for reducing the expression of a target gene in a cell, said method comprising introducing the expression construct of claim 43 or 84, wherein said gene silencing RNA reduces the expression of said target gene.

136. A method for treating a disease, said method comprising administering to a subject in need thereof a pharmaceutical composition comprising a pharmaceutically acceptable carrier and a polynucleotide of any one of claims 15-18, 26-29, 37-40, 56-59, 67-70, and 78-81.

137. The method of claim 136, wherein said disease is associated with a causal mutation and said pharmaceutical composition corrects said causal mutation.

138. Use of the polynucleotide of any one of claims 15-18, 26-29, 37-40, 56-59, 67-70, and 78-81 for the manufacture of a medicament useful for treating a disease.

139. The use of claim 138, wherein said disease is associated with a causal mutation and said medicament corrects said causal mutation.

140. A method for treating a disease, said method comprising administering to a subject in need thereof a pharmaceutical composition comprising a pharmaceutically acceptable carrier and a polynucleotide of any one of claims 19, 30, 41, 60, 71, and 82, wherein said disease is associated with the expression of a target gene, wherein said target gene comprises a target sequence, and wherein said guide RNA of said polynucleotide of claim 19 or 60 or the crRNA and tracrRNA of said polynucleotide of any one of claims 30, 41, 71, and 82 binds to said RGN, thereby directing said RGN to said target sequence and modifying the expression of said target gene.

141. Use of the polynucleotide of any one of claims 19, 30, 41, 60, 71, and 82 for the manufacture of a medicament useful for treating a disease associated with the expression of a target gene.

142. A method for treating a disease, said method comprising administering to a subject in need thereof a pharmaceutical composition comprising a pharmaceutically acceptable carrier and an expression construct of claim 43 or 84, wherein said disease is associated with the overexpression of a target gene, and wherein said gene silencing RNA reduces the expression of said target gene.

143. Use of the expression construct of claim 43 or 84 for the manufacture of a medicament useful for treating a disease associated with the overexpression of a target gene.
